United States Patent Application Publication US 2026/0258423 A1 - sequence listing, part 13

SEQ ID NO: 167803 - DNA, 46709983 bp, Homo sapiens (residues 10,009,285-11,677,498 of 46,709,983)
  source 1..46709983: mol_type = genomic DNA
agatgcttattaggagagacaataattgcaaaaggggattattaaaagtagtcatgaggaaacattttgtggatttatatgttcactatcttgacaataatgatgatctcatggatgtataaatatgtcagagcatatctaataatttatcttacatatttttggcttttaatatgttaattatagctcaataaatttcttaaaaactcattggactctatctgtaatgtgtgtatgtttagttttaagtaaagtgcagctaaatttttctccaccattacaattttcaaacatactttcacttacagaatagcatactgaaaattaacacatgcttttataattataaataaaatagtaatatatcttttctgctgaaataaatgcaaaccaattacaaggaatttattagtttttattttagttacttcatatatattagcacctaagcctcaaagattcactatgtaattgtgtaaattagtagtagggttacctgaatctggcttaataatcaattaatcagtatttatctttaaacattttttcctttatgaattgtgtcacacttttaaagagcccttcctacattacaagcatatataaaatatatattttttttttttttttttttttttttttttgagacggagtctcgctctgtcgcccaggccggactgcggactgcagtggcgcaatctcggctcactgcaagctccgcctcccgggttcacgccattctcctgcctcagcctcccgagtagctgggactacaggcgcccgccaccgcgcccggctaattttttgtatttttagtagagacggggtttcaccgtgttagccaggatggtctcgatctcctgacctcgtgatccacccgcctcggcctcccaaagtgctgggattacaggcgtgagccaccgcgcccggccataaaatatattcttatactattttagaataatttcagaagttagattgttttctagtttttagtgttttcattgataccaaatttatttttatgtacataaatgtatgattttaagttagattatttcaaactcgtatccctgcaattatctgaacaaaatttttaagtagtcacattgacttttttttcaaaagttagttttaagctatttgataacatatggatatacttcactaaagttgtatttttgtgtgtaattctttaatccatctggagatattttggttgtttttcgatcagatagccagttaaaccagaaagaaaaatcttaccaaaaagtttccacttagaaaatttaatagccaaaaaaactaatatatgcaagaatgaacaaaaacatattgataaaacttatacatcatatttttattgaaatatttcataatgaaatgtttcacatggttaaagaactacaaattcatccaatgtaaataaaaacttcatgggaaatgtataatatatgagggattatttgatatctgaaaaaattagatagaaaataaatgcttaaaaacttctagaaggtaatccagtagaatatttatcagcttaggctaacaaatgatataaacatgattaaagaagagctaaacttaaataaaaatattaagttgatgacaagtgtaaaacaccattcttcaaaatatgcaattacaaataggaaagcgctaataggagaaaaaataaaatgtttataatgcaaaaagtattaacattcaaaactgttgataatataaagaaagatattataaggaaaagtattccagtagtagagtagcctaaatataaggcaattcgaagaaagaaaagaggaatcatgaataggtttatcaatcctgattccatcttaccagtgattagactggtaaataagaaaatgtgtgataataccaagggtaataaagatatatttcatttacatttacagtgctggtaaacatacactgtacaaccactttggagaaaacttggaagtacctaaaatgtgaaaatgtacagttgctcttgatccagcaagggtacctctgagtatatattgtggaaaaattctcacacatgcatacacagtgaaacatgtaagagtgcttatagcagcattgttgggattttctttaaaccctagatttgacctatatatctatcagtagagaatcaaaataaaattcaagctattgttatacagtgggatatagtacatcactgataattaatacaaattaatattacgaaccactcaagtttgaatcaaatattaggtcatggtataatgaaattataaaactatttagagttaaaaacaggcaaaaatgtcacatttattttagaattcataattgaatagtagaagaaagtaaaaatgcataggaatcatcaacatgaaacacaggaaaaataaatgaaacataggcaggtgattgcctgcagagcaagaaagtagagtttattaaggagggcagtatgagaactatttaagatattttaggataagaagcggttttgtgaatttgaattcattatataacactttctattttgttttgttattcatcatttaacattttttaaaaaatataaagaattctcataagtatttttaaactagaagacaaataagtggaatgaaacatctaaatgtcaaattttggtgtgtatgtcctattaatttctaagcagggacacctggcaagcagaaataactctgaggacatgtgggattttgaattttttgacacctctgtaaagttatttggcaagcaataataatagctaccacttatttatcaagtgtttactaatgtactaagcattggcatatatggtttattacttctatcctatttagtattcaaatcaatatgatgtctattttttgttctgttttaaaaataaagaagctaacatgtccaagccacatatttagtaagtattggaactacatcaaaacaagaaagaaacatttcaatggtttatcctactgtctacttcctaaaggaaaattataaatttgcagtaactgatccaaatacatttccagagttactttagctttcacagtgttggccagcacaatgtgtttttgtttgtttgtttgcttgcttccttgttttttaagaacattcccatagttgactatttcaatatttaattctccaatcttgtattttgggtttctcttgataaacatcaaaaaaggtggaggcagtttacactgaatagacttaagaagctgacctttacaagaaagttcagatgcttcattttaccacaatttctccactgcttagttttattacacctagtccatatcacgcatttgggttacttgcctggctcatctatgacagaaaagaaggaaaggagaaaggaagcaaaagagaataaagaacctaaataagtgctattcatctattcagagctgtttcaaaaaattaagtaaatgttttcttcagtattctcagtcaaatcttgcttcatacttattataaataccctgaaggagtcataccaatgtgttctctgtaaatgccatgaacaacactttgtttttgtataacggttttcatgactattgtattaatagcacatttaataatatttcaataggtcaaaattatgtcatatgttttcttacaaatttttgtcattttttagaattaatgctacagcccagaagataaatattattatgaaagcttgtttgtaaaaaatttcagtaattttatatctttttggtaagattaatggcttctattgtatatatttacaatggatatcaatgttgatattgagttatccaatctaatattttaatagctccagcttgaactatgaatggtagatgactgtgttctgtacgtataccaatatgagtatttttctatgttaaagattttactagaatccttaaataaaccataatcatctaatatgattttctgctggaatttatataatttattatcataaaatatattgaattgctcagataaaaattttaatttctataaatcttaatatataaaaatatggtcttcttcaacaaattgacattccaaattggtttagaatatccttaaataattatagttttattttcaaataagttaattttacaaattgttatcatttttaacttaacttttgtgttttgttttttgtttgtatttatgtcttccccaaatgtcctctttttaatgcaaatgtagagaaggcagacacctagaattccatcctagaattaagacgtgacaattaactttgattttgtaaatgcattgtatgctgacctaatagaagatgaaaagtggaaaaatttgcacaatgagttcaagaactctgaggaaaagtattcaaagagtctagttaagaaaaccttattaagtggaaatttcataccagacaaggctgcacagcttggaaaagccctgcacttaaaattaacttcagccggtgatgtgctgaggctcttgactcaagtacaggcacacgggctggctatgatttggagaaacatggtaagtcatatgaatgttagttgataactaattttattgttcatgtgcggaggacatagggtcaaatgtgccccaagaggacctcgagaaaatatatgtgggtctggatacagacctcatgtgacaaaaagaagcaataaccgggaaagactgattctctctgcttatcatttagaacaatcaaaataactttgaaatgaaaaaaactctaggagttttgaaattattaaactggcatgtacatattaaaagggaacaaataaggaatttactactaatagggcatgggggaaagcagacccaaagttctaattaatattttaaaatgatggtatccattttccggttttaaggtaagtccatactgctgaaaattgctctatgtttcttatcaaatttatctatatcagcatttattttacttctaaatttaattacaatttttaaattccattaaaaaagttatctcacatttaactatttgttacctttccttctcatcttacaatattacttctctacctgtcaaactatatacagtccagttcctattccaattatggctataattgcggtacaattaatcaattaattaacaaagcatagcaaaaaatcaaaagaactttaaaaaattatgtataattgtgatcaatatgatgtttttaaatatgttcaactatttatactattttccttctcaaagaatcatcagaatgctgaacacataaaataaacattgaataaattaaaaataatttttcattctaaacaatctaatttaagtatagttcctatttagacttaaccataacactttgaaaaacttgaaagaattcactgattttttataaaatttaaaattaatacatattacacaatttgtaatatgtatttttactttgaacacaagggcattttaaattgagcttctttgaaatataattcacatataaaaatttcagaaaattttaaggacctttttctttttactaatgctttgattaggatttcagtctgcatacgaatttgtcatgattttagctgaaactatttaaatagatcgccgccgggaaaaaaggcgggagaagccccggcaggtttgaagctgcttcttcgaatttgcaattcaatatgaaaatcacctcagagctggtaaaaagaggcttaacccctgtctttagatttacagtccaatgcttcactcagccattttacctcaccagatcaatacctttccttatctctcaatgtcattagatatatacattttaatcttaatttatagaacaaatatacatatctttttctgattatgtgcctctaagtttggtaaaaagttcttgatgcaaccagtggactcaacacttctccttactttgcatttataataataggcttatagcagttttttctccaaattaaagtataaatatttaatttttacttttaatttttaaacgttactcaatattatgtttataaaatgacttctggaaaaacatgtctattttctatcatttattatgtcataattgagagaagcaagaacccaaattcatttaattataacacataaaactgaataaatatagatgacagatatgtgttctttgtttttacatatctgttgtaaaccatattactcagattatctcacttctttcaacttttctaataaaagcaattaccatacctatgtggaatgtattttaatagtaattcgttttaataaaagttatatatttttaggaggtcaaaatagcaatttcaatttatgaaatgttgactttttaatcttattgacatattttctggaggcaaattgtagaactatttgaatagcaacagaaatttccagtggagagacagtcagatacgaaacttccgtgagaaaactgtatttatcagtgactgaaaatccttggattaggacctaactcccacctacttgttcttgtagatactctgtctaaatacagatatagatagatacagatacagatatagacatagacatagatacaagtacagttacatagaaaaatgaaataatattataagatatcctgaaatatatataatatgttagttcctaacattgttttaaaagttacttgtttaaccaatcaaagaagaaacaacttaaacagactttacaaaaattcatcagatttaataaagttgtctattcgaagatagggacttttttcttttttaaaaattaaatgagaaagcaactattggcaaattcaaattcctttcttatcaaaatatatattttgaatttttattgtttaaaacaatatagaatttgaattaatagcttagtaaggaaatgtctttcctcaagactacaatgtgctatcttgcatacaaaattaccaaataaacacagtggctgctgataaatttttacctaattattcaatatgtttcccttgaaaaatgaatgattaaatgaattaaacaacagttaaacaattagattcagtatgaatattatgtgcatactgtacatacttttgtattttcaaggtcaatcattgcatagaaagaaattaatttttttaagaagttaaaaatatagtacttaatcttgaataaatttgttaacaactagggcacattaaaatatgcctgaaaggtagtaaaattacattttaacatttatacaagaggttgtctagaatattacaaaagaaaaataacctaaaaataaaaactttcccaaaacaaagactcaaaagcagcccaaaactgttacaacaataaaaataatgctacaatatttgtttctattttaattgaaaaaaggaaaggcagatttagttattactctaaatagatactttattgttgatttttctagatttaatagattcaatagtttgaacttaaaaccgtatttctcaattttactctaattttctaacctcaaacttaaaacacatcatttccctctttactttcccaccaaccacacacactagccacgtcattctatttgtatttacctcattctttttcacatactctttgtgtgtgattctgctttaccattttttagaatatcttttctcaatttttcacctatgttaaatattgttttaatatatagcgtattaatagaaaagctaaggtatagtaaagcaaacagatcagaagacaattgccattgaaaagatactcacaatttccaagagaagggagcatgtcacaccaggggagactacagggaagaactcaggtccatcaggaaacagagagagggaggaattcaggagcaagaccctagactgtggtgtttgcaggaagaaaccaagcagggtaaacaagcttaggactggctcatttgaataatttcagtgggctctggggcataagagctgtctctggttctctggtttttggccctagcgtgattaggacagaagcacagtggcctggagtgtgacagccctatagagtatgagtttgggaattggttagtttgtatttgtaaagcccatcttcatgaggagttcaggggagacttcgtagccagaagctgaggcaaggtgactccagcatactatccatcttcaagaacaagatgtgtctgaattgctgtatgttataaagtttcgatgtctaatagagtaaatctttcatcctgttggttctctttgatttaatttgcttttttctctctctctctaagtcctgttctcggaataatccaatctgatatgtgtgtcactattccaaggaatgagtaaatcacactttatttttctgcttcttgtgaacattaatttgttcagttttctgaaattttaaatgctattgtgatttttttaaattgacaatgctactttgcttattgtgtacttgtcaccagaaatgcaagagctaagatgtctctggaaatggaattcctgggtcacagggttggcacatgatcaacattattagataatgttaaattgttgtacaatgtaatcacattaatttgtatgccaatagtagtatataaaagtttgaattgccctacatccaaactcacacaaaaataaatgcagtctaaaaatttataatgtgatgtatatgaaattacattttgggctgggcgcagtggttcgtgcctgtaatcccaacactttgggaggccaaggtgggcggatcaacagaggtcaggagttcaagaccagcctggccaacatggggaaaccccttctctactaaaaatacaaaaattagctgggtgtggtggtgcgtgcctgtaatcccagctacttgagaggctgaggcaggagaatagcttgaatccaggaggtggatgttgcaatgagctgagatcatgccactgcactccagcctgagtgacagagtgagactccctctcaaaaaaaaaaaaaaaagaaattgtattttgttgttttatagttttaatttgaattaataataagctttggtaccatttcatatattttaacttttttattatttaaaaagtctgcttatgtattttcctattttaatttttatgtctttttctaaatccttaacagagattaattgtatcgtgaattttactagattgttatgtacttgcaaatgttgccatgctctttatgatgatttttcattttaccaatggtgatttagaaggaacagatactcttgatatgagtgggaccaaacttacaaatcatcttgctccagtcagtttttgtgctggtttgaaaatttttttcatactctgagattcaggctaaattgcttttaaaattttaaagctttgtgtttcaaatttatattcttgatgagatgtatagagtgagaatgagatacattgtctttttattataaacaatcttgctttagtagctactgaagtttacttttgaaattgtatttcttaaatatttctgttaattatagaaaattgattttgtattctattttatatccattaactttgctcatttagtaattctaatcatcctaggcattcttcacaatgcattgtaagataatgtatacatttcataggatgacaatttttaggtacacttaatgggatgggactatagattattgggattttctttaataatagtttaataatagtttaaaattggtaaactatttttaaggggaagttgttaacaatcactttctacaatatgtgactctctcttcaaagagtaaatcagagacaaatcttttttttcaaatttctttttttgaaaatcaataataatgaccctattttttagtttgaatggattctcattaatttaaaatgcaaatattttggactaaatgtttgtgtccctcccaccccaaatttaaattttgaagccctaatccccagtattatggttttggagatgtgggcctttggaggtcaaaaggttgagatgaaaccatgaggatggagtcctcatgatggaattagtgaatttattataaaagacacagaagagcactttcttgtacacttcctttgtctctgtctctctgtgtgtttctctatctctcttccctgtgggaacacaacaaaaggtatctgtgtgacaagcatgaagaataccctcagcagaaactgactatgtgtatgctgatcgtgtacttcttagcctccaaactatgtggaaaaaaatttgttgtataagacaccaagtttattgcattttgttacggcagcctgagcagtctaacaagaaagcaataaaaagtataagtaattaagatgaaactaaatttatcatccaaattctcaccataaagaaataaccattttcaaaatatgtagaacaagatttcacatattttcctaaagtttatggacagagataattgataaagattttatacaaattgactattaagaaacgattgtatttaattataacagaagataaaaataattttgtatagagaaactgattaacgtttatgcatatttgttcctaaagtacattcaaagttaagagaacagattataaaatcataagttagagttcttatagtataggtttcttacaagaagggaagaaagcaaaataaatttaacacaactaaagcagatcttgcagaatgtgatttatatatggacatgagtcagcttcctaaacttgaatctcagtgttatatagatgaacccactcagacagaaacaacgttgaactagaacagaactcctttgacaggcaatgcacatgtttttaggagagcagactgtaagctttctctgagcctccgagaggcagaaggtaagaatgattctgggttatgcatcctcaagtttttgtttaaactctctgaataagtacctcattccattttgctggggcaaagtgagtggatggggaaagcaggccaagggcattatgtgaatgggtcacttcaaagggaaaaacatatctgaaacatggtagaagcaccccataactactttttcatgcctttggcctattggacttaaccattatagcaatgatgactcaaaaactacactaaagcagtgttaagaggaaaattgatggtgctaaatgcattcatcagggggacaaaaagttctcaagttaatgacctaacgtagcaactaggggaattagaaaaaaagcaacagaaaagacccaaccccaaagctagtagaagaaaaaaaaaactgaagtcagagaactgaaaaaaaattgttatctaaaagtccacacaaaagatgaagccaagagttttttttaataaacaatactgatagatcattagctagattagcaaagaaaaagagaagatccaaataagtataatcagaaattataaagattatgttaaaattgatcccatgaaaatacaaaagatatgcagagactattatgagcacctctctgcacacaaatctagaggaaatgaataaattcctggaaacacacattctcccaagattgaatcaggaagaaagtgaaaacctgaacggaccaataggaagtttggaaatggaattagtaataaaaaacctacgaaaataaaataaaataaaataaaagccccgtaacagatggattcacagctgagttctatcagatgtgcaagggagaaatgataccaatcctactaaaatgtctccaaaaaatcaagcaggaggggcttctacctaactcatactacaaagccagcattaccctgttaccaaatctggcatagaccacggaaaaagaaaagagaaaactgcagatcaatatctctgatgaaaatacaagcaaaaattgtcaaaccaaatccagcagcacatcaaaaagttcattcactatgaccaagtagggtttattcctgggatataaagttgattcaacatatgcaaattgataaatgtgattcaccacataaacagaatcaaaaacaaaaaacacaggatcatctcaatagatacagaacaagccatcaataaaattcaacattccagccaggcgcggtggcacacgcctgtaatcccagcacttcgggaggccgagacgggcggatcatgaggtcaggagatcgagaccacggtgaaaccccgtctctactaaaaatacaaaaaattagccgggcatggtggcgggcgcctgtagtcccagctactcgggaggctgaggcaggagaatggcgtgaacctgggaggtggagcttgcagtgagctgagatctcaccactgcactccagcctgggcaacagagtgagactccatctcaaaaataaataaataaataaataaataaatgaaattcaacattccttttatgataaaaaccctcaacagattaggcattaaaggaacatacctcaaaataataaaactatctatgacaaacccacagtcgccgtcaaactgaacagcaaaagctggaaccacacccctggagaactgagacacaacacggatgcccacttttaccacttctattcagcatagcactgaaagtcctagtgagagcaaacaggcaagagaaagaaacaaaagccatccaaataggaaaagaaattaaacaatctctctttgccaatgttgtgattctacacatagaaaatcctaaagtctccatcagaaggctctttgaactgacaagtgaattcagtaaagtttcaagaaataaaaacattgtaggaaaataagtagcatttttacgaaccaaaatcattgcagctaataaccaaatcaagaacacaatccaatttacaatagccacaaagaaaatgaaatacctaggaattcatccaaccaagggggtcaaagaccactacaaggagaagtacaagacactgttgaaagaaatcagagatgacacataaatggaaaaatatccatgcgcatggattggaagaatcaatattgttaaaatggatatactgcctaaagcaatttacagattcaatgctattcctatcaaaataccaatgtcattttttaaataattagaatgaaacctattataaaattcatctggaaccacaaaagagcttgaatagccaaagcaatcctaagcaaaaagaaaagccagaggtatcgcattgccagacttcaaactgtactataaggctacagtgatcaaaacagcatggtactgatacaaaaacagacacacaggccagtggaagagaatacagcacccagaactaaatttgcccacctacaactatgtgacctttgaagaagctgacaaacacaagcaatggaaaaaaaatccctattcaaaaaattgtgctgtggtaattggctaaccatatacagaagattgaaattggacccgtgcctctcaacatagatgaaaattaactcaagatagattaaagatttatgagtaagacctaaaactctaataatactggaagaaaatctaagaagtaccctttttgatataggctttggcaaatggatgactgagttcccaaaagcacttgcaacaaaaacaaaaattgacaggtgggatctaattaaactaaagagcttctgcctaccaaaggaaactatcaacagagtaaacagacaacttaaagaatgggagaaaatatttgcaaactatgcttctgataaaggtctaatatccagcatctgtaaggaatttaaacaaatctacaagcaaaaaacccaaaaaatccacctaaaaaatgggcaaaggacatgaacagatatttatcaaaaggtgacgtaacaagcagacaagaaacattaaaaattgctgaacttcactaatcatcacataaattcaaatgcaaaaaccacaatgaaataccgtctcacaccagtcagaatggcaattattaaaacttacaaaaaacaacagatgttgagaagtctgtggagaaatgggaaggcttatacattgtaggtgggaatgcaaactagttcagccactgtggagagaagtttggagattcttcaaacaacttaaaatagaactaccatttgacccagcaatcccactattgagtatatatacccaagggaaaataaattattttatctaagagacacatgcacccgtatgttcattgcagcactattcacaataccaaagcaatagaattaacctaggtgtccatcaatagagaattgggtaaagaaaatatggtatgtatacatcacaaaaaacaatgcagccataaaaatgaacaaagtcatgttctttgtggcaacatgaatggagctggagaccattatcctaagtgacctcatagaagaacagaaagccacataccacatcttctcacttatagatggtagctaaacattgaatacacatgttaagatgggaacaatagacattggggaccactagattggggaggaaaggtaggggttgtgggctgaagaactacctgttgggtactgtgtttactgcctgggtggtaggatcactgggactccaagcctcagcatcacacaattactcatgtaacagtctttcattaacctataataaaagttgaaattaattaaaaaaaacaaaacaactacactgtttcattgctctagatttctttttgtctccatttaattatggagagacttgcagagacagaaatgactgtcacatgttcttatacacataaagccctagaaacaggagccacagcacatcatgcactggggccatatggggaagtaccagagtcagtgaaggcaaaaggagcaaaactaaagcatgagccagagcctttaatatggttttccttggaaggaatgagtgagacagtgtaagcagctgagcaggtttaagactgggtagtgtgagtactttttgtgtaatttagtccctagtgttccagcacctgattctggggtgacgaaagcagagggataatgtcccagaccacaggagccatataataagagtcaagtgagggtgtggattctggattggttggtttgcatataaataacatgctcataggcaagttgtttagtatttctagaaattagctaaccctaggaggagcactctgtcttgaaacctatatggtctcaagatgtcaaagcaaaacaaaaacaataaccatgattaatacagcaagacggaataagctatatattgccttaaggaagaagttacttggctctctatggctgatcgtcataacctgtaagatttgttctcttgacttgagttggacaactggggttttatttctgaagcattttataggaactactcattgttcttgtttttgtcatattagtcatgatgctggccaattgcattcaactcagtcttaacttcctttttatagcagccctctcaccagaagattgcccttactacaaaactgcaaaaagttcaagaacatctcataatatggttgacaatagagacaattaaacagtctctaagttgtgaagatctgaatctctaaacttccctgaattggcttggccaatgcctcaagctagttaatgacaaaatgggaggaggggtagccagaccatatataagaatagagctctgacccacatctttgtagcaaccagcctgggaagccaaaccacagcctctgcatcaaccagccccaaatgaataggatttagttaatgattgccaggttccctatttttgcctcagctgccaactcaggacccatcagagaaagtcaagtatgctttctgactgatcacataagatgctccatttccccttatttatttagtccatcttcagcttccccatacaaccttaaagcagagcatatccaaaagctttccttttccaagtacaaaactttcctattcctcagcctttctttgagtcactgcaaaacatatatgatgacagctgactttcttgttataaaaagtctgaataaatatagattctctctgttattattaggtgttatttatttccacaacctacaaaaaatcttcaggcagggtactatttaaaggtgcaatattgaaaaattccacataaaatcaggaaaaaagaaagaatgttcatctcactgctattcttctacacattactgtaagcactaaccattataaaaagaagaaaaataaagggcataatgattgaataggaaaaacaaaattgtctttacttgaaaatgagatgattatgggaaaaaactaaggaatacatttcaaaagctactagaaataaataatatatatatatgaaatttatagcaaacaaggttaatatataaaagtgcatgttgagtgttccttatccagatatctgaaatctgaaatgctctaaaagctgaaactttttgagagctgacgtgatgctcaaggaaatgttcacttaagcattacagattttggatttctggattagcactactgaatttgtaagtataatgtaaatattctgaaatctgaaaataatttgaaatctgaaatacctctggtcccaagcattttttaactcactatatgtgctcattttttttaacaaatacctattaagcagacactatgaagaaaaactgtgcaaacattggaaatacataagtaagcaaggcagaagggcctcttgtattaaaaataaatgaaggaggacactagttaaagtggtaaggagagattttaatcatttaataataatgattgcaacatggaacatggaaaagagtgcagcatgagttgaattcaacttcaatttgtatattggcaactgattgttttattttattttagattctaggggtacatctgaacgtttgtcacatgggtatactgtgtgatgctgaatattgaacttctaatgatctcatcgcccatgtagtgaacataagacccaatagacagtttttcaacagttggccagctccctctctcttctcttttggaatctccagtgtttatggttcccatctttgtgtttttgggtaccaaatgtttacctcctacttataagtgaaaacgtggtatttagtttgctgtttttgcgttaattcgacaagcattttggataagcagttcttaaccggtaaaatgtgttgttgcatactaataatgaatcattaaaacatgataataaattctattcacaatagaataatcacaagcatataattcttaggaataaaggcaacaaaatatgcgtaggacttttatctagaagctaaaaatattattgagaaattttaagaaaaaatagaaaatgtagatctatacatgttcttattgatatgttatttatattaagatatccatccaccttatattgatctacaaatgtgtttcaactctgatgaaaatcacatcagattttactgcaaaataaaaataaacaatgtgatgtcaagatgtatatatatatgcagaaatacaaaggaacataggtaatttaaccaatcttggaaaagaatataatcaaagaagtaacattaaattatgttaagatttttaaagctgcatgttaaaaaatggagcatccataaatatgttcatgtttaacgtagatgatgaactgattttctatgaagacaaaggacaatagaaaacacatatttttacaacaaatctgaaacaactagataaatttatgaaaatcaaattaatttttttatttctaactttttctgttgcccaggctggagtggtgcaatcatagctcactgcagcgtggaactcctgggctcaagaaatcctccttcttcagtctcctaatgcactggggttacaaatgtgagtcatcatgcttagcctaacgtcaatgtttatcccatatcatttacaaatttgtgatgaatccaatttgagatgctcataaacataaatatgaaacataaatataaaaactaatactataaatcatataagagaacaatcttgcatctcagggaggcaaaatattacatctttagggaggcaaaaatatttcagacaaaacaaacagaaaatgtagccgtaaaggaaaaaattatataaatagggcttcctcaaaataagattttctactcatcaagagaaagcattgaaaaaaattaaaaggcaggacacagaatcagaggaattatttttaatacatacaaatgacttagaagatcttaataagtaatactattcagtaataaaacgtctaacagcctctccccaaataggcatgggtcttgaatatcttacaaaggaagatatgcaatgtcacatgaacaggcactggacatcattattcattaggaatatgcaaatatacatgacaatgacagccattgcacattcactagaaattatttaaagaaattttaaaatactgacaataccaaaaattatagatatgtagcaactggaagtcgttttgtttcttaagagtgtaaaatggggcaaacactccagagaacagttaattattttcttataaagtttaaaatatatttttctttgacccagtaagttttttctctgttatgtacacaaaagaaataataactgatgccacgataaagatttattcaaaacttattagaacagttttattcttaaaactaaaccttgaaacaacccaaacaaccttcaataaaggaatggatacacgaattgtatatattcatacagtggacactacagtactcagaattaacaacaacaacaacaaatcagatattgatgtgtaacaaaatgtctgggcctctataaaatattatattgaataaaataaaaaagttgaatatctattcttattatgttgaacaaatttaaaaaaaattacatggcataaagttccatttatatgacattccaatagaggcaaaactaatccatggttatgaaaataagaatggattaaagatttgatgtgtgaatgagatttaagtggaaaggcacgaaggaatttttgaggtgaggaaaatgcctgtagcttgaatcagtattgattatatgggtctttgtatttgtccaaagttattgaattgtaaactttagatctgtgcatttcacagtttaaaaaaatttacctcaccagtgaaactctgtctacctaaagtctgcagaaagcataactcaagaatttaacataaggtcccctaatcacatgaaggtaagaaacagccatcttttaaacatttaaaaagtcaggggaataaaaatccaggagtttttttttttttttgaataactattaaacttatgccagtgaaagaaaataaaattaattttcacaaaagttgatatacatgactgaggattaaatctatattgatattgttgagattaaaatacaatgcaattttaataaacatttaaaacatggacatggtgtccctaacaatttgttgataggggagaggataatataaaaattaattttatgaatcccacataagtacttgttaaaaacatatgcctctgttctttttatttaggaatcactcacagaaagcacacattctttgtttctgcactaactctggaattcaatattagaaggctcaactgccatgaatataaatcaagttcatctgcatcccctatatcagactaaatgtgtttgtttctcagtattctgctatattccttgtattaattttaatagaatcaaaactgagatatggaagaggatgttatatattgaacaccttttcttccacctagcatacccaatatttgccgcatgggccagaaatataagaattagaaatgcgtctttatttggggtccttacttcactcacaattctagatagtcttttagttatgacaaagtctaagaattttatttttaaataaattattatcatatttttctgttaccattttttggttggttttccatgcagtttgtgcctacttccaggaggaagacacctacacacatttactcttctctactttctttacaaatttgaatatgaaaaagagagccaggaattgccaaaagctggttactccaagaccctaggcattctgtcaaaatctaacttggatgatcatgtaaaatactcatcattttattaatatcagtatgttcattcaaatggtaacaagattttcacttgatttctaaatcactgatcttaagtgaaaaatatcaaaatagaggacttcacaaatattattgtttagaacatcctcactttaaacaatcaaaagttatttttaatgttgaatcaatcatactctgaccttctccataggaaaggaaaatgtaaatatcccagacagcagagagcaaactgtcataaaaataaaactgtactttcaaatagctgtagtccacagcacagctctaacccaaattgtcatttcagctgcttcacattattagaaaatacttaccttctagctttgaacatgaaagaaaagtactcttagtctatcagcttccctaactaggagattcatgtatttgttggggtcatataaagaaactgatagtgcaatttaataaggataatgcagagagggtttggagattctttgcaaagctgttgaagggatgagaaagaacacaagagactgcagtaacctttggttagagtgatttttatcacccctagtttgaaagggccagtggcaaagcaagtttactaactttaggataaagtagactcatcaggaaaagagcaaccacctaagcttaagggacaaagccaatcacccgtgggaagccagtgttaaaaatacttgatcttgctctctgctttcctgagaatacaaatcattcactttaactcattgaattcactcagcagtcagaagaaaaggaagcctcttgttggaattcatactaagaagatcagaaagtgtagtggaaaagagaggactagaactgcaggtgcaagtagaagtcggtgtccaaaaagaagtgtatttgtattgttcatttgacctcatttattttagtatgcaagcgtgtgcttaaaaatatttcagccttctttttactatatatgcaactcatcatcatttattgagagattatatatccatcattacttcaatgatctcatttttagctttcctcttctttattaatggatgcagtaacttctggcattcccctgagaatattaattctacttatttggaagtactctttttattgctctctgctgtctttcttttgtattttatacatctttcatttgctttatgttattttaaatcttaccctatgcacttacaatgatggcacttctctgaatgactgttgattttcttcctttctttctttttttcatgttgtctacatttttttttcaaggtgagtttctgctagactgttattactgagcaatcctttggtggagaaggaggttcatgctgctacaggccacaatttgcctcatttgcagtcagatcaggctttttgtcagagagaggacatgcccattaggcaatatgtattcagatatttccaactgatcgctgccttttctttctgattcaaattcccattctcaatatatttacctaatgtatgcctcccttttgcctttttaagcaagactaaaaaatcaatacccttgaaaaaaattgattaatttggctaacttaaatttaaagtcttcacttctagcaaaatagttttactacatgttttttactatgagaaaatatgtaaactatgtataccaaagcaaatctataaataatttagaaaaataaaaatatttcgatagaaaagtgggaaaatgtaaaaataggtacttactggaagaatcaagagattagttctaaagaccttaattatttgtttaaactaatttaattaaaattttaaaaataattaaatttttcaataatcaagtaaaacaaattaaacttaaacaatagaaccttttattttgagatgcaaaagcatgaatcaaagacatctgtaaagcttaaatgtattcagattgtaaagctaacccatgtaaaccaaactaggccaggaattagactatattagtgccccagactcccccaagtgtcccttcctaaaagaagctcctctcaccctaagttttatgtataatttttttgctgtgcttcaaaaaggtatagcatgtatgcatctctgaacaacataccttagttttttttggcctgctttgataattactatgaaatcctctttctgtattattttgtgccacactccttttgttcaacatatgtttatgagtgacagccctgttgttgcaagcggttgtaatttatttattttcactgctctataatatttgattgtttatatagatgagaattttctattttattccttatatacatttgtgttattttaaagtttgggtgcttaggagcaaagtcaatatgaaaatacttggacatatgctctcagaattatatgcataagtttatctacaacatataactatccaaggaattttaggagcaaacatatgtggatacttatttaatcacagactaactttttttcaaatcagttgtatcaatttatacttcttcctgtggtacctaagatttcataaaattatactttcaatccatgggtttagcaaaataattcaaagtttaataatatcaaattgacatctataatttaagaccactttagatgaaaatttttgatatctattaaattttacaatgtgaataacttataagcacaattttccttaactcatcatctgtcttacgaaatactaacatatgtgcaataaaatgcaataggatgtcaattacagctttttaaaaatagtcaaaagcccattaaatagattaaatgtccaccaatagagaaatggctaagtaaatatgacatatctaagagttaaagaaatgataaagattaacatgtgttgaatcactaagatttccaatacatattaaattgaaaaataaaaacacattattgtggttaaaaatacacaaagtattagattatcaaatcagactcacatgcatcggagatcttatgcaaacttaactaataattttatggataaaaattattgtgaggtacaggtggagcaaggtaaggtcagatagcactgtgagaatccctgggtcctttcctcccacatcagatatgctttgaacaaggataatagatgatgattctgagtaagatgtgcggtcatctcacttacacagaggagatatttagatcacaaaatatctcattttgtctttagatggtccaggaaactatgccccatgagtcaaagagatttaggttttattataaacaaccctagaaaagaaatcacagcacatacattcttctaaaagcattctgtaggtaagatattcctccctggaaacttcttagtttgtttgccaagaggttagccagttatatggttaccaaaaaacctgccttctttgtctccagcatgtttcttattaaagagaatgaatgaattgcagaactattgtttgcagatttacttttaaatggtttatcagtaaaatatgtgagaatacatttttaaaatgaacttatgtgattgctttggaaaatgtctggaaatacgcaaaccacactgataataatggccttctgggggtgaaccaacacacaatagatttactggtaatcgtttgattttttcaaaagtactacattcctgtataatttgcatgattaaaatgtatttaatataatttccacccgtgataattttcttgtgtataaataggacattgctcttgctattagcagctatatactgtaatatttctagttgaaccacagggtttagcagacttcagcccatatactgaacctgtcctattgcctgtttttgtacaacctgcagctaagaatgtttttatattttttgaataatacaaaaatatcaacagaagaataatagtccgtaacacaaaattaacaaaatttaacatttgtgtctatgaataaagttgataatattgtagccacagccatttgtctgcatattgtctactttcttgttacaacagggtttagcagttgtggcagagacttctacaatgttcccaaagcctaaaatatttactgtcttaccctttatagaaataaatactttgctgacactgtgactcataataatgtttgcaactactttttgaataagctcagaagtttacagacacacactcctaaaatatttgttatattgctctttatggaaataatttgcttatccctgtgaattatagtgatgtatacaactgatttttgaataagttaaaaaatttagctggggcggtgcctcacacctgtaatcccagcactttgggaggctgaggcaggcagatcacctgaggtcgggagttcaagaccagcctgaccaatgtggagaaacccagtctctactaaaaatacaaaattagctgggtgtggtggcgcatgcctgtaatctcagctactcgggaggctgaggcaggagaatcgcttgaacctgggaggcggaggttacagtgagccgagattgcaccattgcactccagcctgggcaacaagaacgaaactcagtctcaaaaaaaaaaaaaaaaactttacacacacacacaaacatggattatggattgagttgcatgtatttgaatattagttttgttattcttgcaacttattagggggtttgacactttttctaaattacaattgggtgaaatttttgcaattgataaattgctagataacataatctagctcatattatatgataactttagatgttaaatcagtaataaaccttatgaagatctatgtttctaggaaacaattacttcaacaagaagggaaagtaaagacagaaggtaaaacaaaatataagacgaaataaaataaagatgggaattgaatgccatagaagtgtggaagttggaaggaaagtttctaaaattatttggataaaaaggaagccatatattttactgaatcttctagatgggttttaattctgtatcctttcatactcatgtactatgcctttttttcaacttttcattccacttgtacttcctaacttatgatgaatttacctatatagagtccttttatcatttagactaaaattgtatttatttgaaggtaagaacggtcatatacttcttagttgttttcagaattgaaaacatggttgaggccaggcacggtgtctctcatctgtaatcctagcactttgagaggccgaggcggggggactacgagatcaggagttcgataccagcctgaccaacatggagaaacgtggtctctactaaaaatacaaaattagctgggcatggtagtgcacacctgtaatcccagctatttgggaggctgagtaaggagaattgcttgaaccctggaggcagaggttgcagtgagctgagatcacgccattgcactccagcctgggcaacaagagcaaaactcatctcaaaagaaaaaaaaaaaaaagaaaacatggttgaaagtcaatatccatgtgataaattgagttagaaagccaatgagagcttagctaatataaaggtgatggaattcactatcaaaacttttcagagacttagaaaaaatatggaaaattagtgaaaatgtaacagaatgaggcttgaaatcaagataattaaactgcaaactttaagaaggcaggaaagatatcctttacttagtttgtcttgtccaactaatggttagttgaatgccatgcacataacgcatccctctgagtacttattgaataaatgtagaatgtcattctggaataaattgaggcaagaaactagagggatagcagtgtgaaaagtgagattaatttatttggtatagagtcagtaaatttaagtgggccatttgaaacaacaagcttaaaagaaaaccaaataagcattttcaatgcatagaaatgcaaccatttttctccttctgtactttatccattcaaacattgcttgaaaaaaaatataactttcagtcttgcttttttatctccaccaaactcagataattttggtcgttgatgacctaagctaattcctattttagaatgctacggacgaacgaatctcaaaacttcttttaaccaacttattttattccatttcctaaggaatagaaattttttacctccaaccaggggagctatgaaacaaactccctatttatttccaatctaaacacatttgataaaacaggcagaggaattttttatcagatctgtattttaaattttcatgactgttgttcaagagtttccattcttcttcataaatatgtagaggcttaaaattcttttctgaaaaataaactgctattttaaatgattttaactcatatttataatacctttttttattctctgatgatctcttgctgtttttctttctctagaaatgttctaagaataaattagctgttatactaagaaaggttcacaaaatgagtccttcacctatacagcacctcttctaaataacagagagattacaaatccaatgtatttaaactctgagatgtctatatgtgtagtgttaaaaaatgtagctgtcagttttaacagcttttcccctgagatttcagtggctagctaatgatctcttttaaggattaggacaatttctagatagtgaaatggcaggaaaacatatcaaatacatatttttccattatactattctgaggactgtaaagtcttactcaatgtatatcacttttaatttttaggatacatagaaatatttgctagtagaaataaatggcaactgtttacttgaagatggtttagaaagatgcttttctcttttaatttgaattgctactgtaaatgtcatcacatgtatttcagtattgtctatgccaactttgtacctgaaaaacagtattatgaattgggcattatattccatcttcataaattaaaaaagaaacataataactagcgaagtggaatgaggaaggtgtggggagacacagaatttttcaaaagtagtaacaaattcaagcatgtattagcttaatatatcataacttaaatgatttaaattaggtatatgtttataccaataagttttaaattcttaattctaacctcatcaagtaccaacaaagaatgcccttccatattaatacactttgggaattaagataaagtatatgtaattaaatcatcaaactccttttgttgtttagcaggtagtttgatataataagagaaattgtgttctcattatatatttgtcacaatgaatgaatgtaaaaccttaatcaggctatctgacttcttttagtgacattaccctttttgcaaccaacacatcaaattagtaatatttatcctacaaaaataatgtgaagataaatgagataacatatataatagtcacaaatacttattgaataaagctgtttttatttatatatttctatgtacttactagatatgttcttattaaatattttattatggtatatgtcaagtcttttacttctttttttatacttagtatattatagaactcatcttccaataaaattgtaatacaattttcttgatttactaatcctaggtgaaaaaaatatatatatatatatgttgtcttctgtttgaattatgcttagtggatggcattttcaataatctctctgattcttccttttcctgtttaaactactctcattctcattgtggcctagagttctttttccctaatattgccttcagaaggctaagtttctaatataataacaatttgagtctttaccacttctctctagaatcgtgatttagactaggttattagagtaaacaatatgattccaaattttttcttttttttaatgggctagcatccaaaaagcttaagaattcttgggggaaatgacataattaagctagattattttaatttaaattcagaattaaaaatcattttcaatagcttctttgtcttaatttaacaagcttttgttgaacattgattatattttgaattctattttttcttttatttttagttggcacataattatacgtatttatgggatacagagtgatattttgatacatgtatacaatatgaaataatctaatcagagtaattagcatatctatcaccttgtacatttgtcatttccttgtgatgtgaatattcagaattctgtctggtacgtttttaaaaaaattcactaaattattgttaacttaattcaccctacagtgctacagaacagtagagctattcctcccttctagctacaactttgttacaaagttaactttgcttaccaacctctttccatcctcttcttattcccatcctttccagcctctgataactacaattctacttgttacttttataagttcatttttacctcccacatataagtgagaacatgtggtttttctctctctgtgcctgtcttatttcacttaacgtaatgtcctccaggctcatccacgttgtaactaataacatgatttcaattcattacaaaacttaaaaggatactcaacagtgccaaacattctattttagtttcccaatgcattcactcccacagcattcataacaataaccttctacaaagttaccacgtcttatgctaaattgacaagatctcccaatattaagtaaattctgtccttagctctccctctcattttagtattatcattctcattaatgaataattccctttttgttaaaagtttacattgacctaccgttgtccttcagttatcaacttactttgtattctttctttgaaagaaatcaatcaaacaatagacagtctccttcaatatttcctgtactgtcttcaacccacttagctgagtactttcttttttctctacttactcactttttcccgagtgttctcaagcattttcatgggtttaaaggccagttacatgatagcatctcagaatatttcccattttggtatcttctctgaggtagagctttgcatagtcatctacttacttaatatcaaatgtggattgttttatagacaactgaaattcataatgttttaagtagagttttgttattttctctgcttcccagtttgtgtgtgtatgtttgtttgtttacttcagctggtgttcccattgattttatcttatctaatacaccaaaaccctatcagtagctgttttcttcaaacttgcacatatcttaaatatgtatttcattattttgaacaaggtctccaccttcttgtcctttcactttaatagttttctaattcatttccttgtgtttattcttgtcccagtaaaaattattcttggtttaagaggcagagatatatatgtattataaacacagggaaacaaattagatataaaccaattattataaaccaatgtaataataataatatatattacatttttttcttttttatttcttctttttcttttttattttttgtaatgtaagcaagattctttccctcctttgccttaaatcctttagttacttgtggagtacaattacaaatctccaggatgctaaagctctgctctgctgtctacaatcaaaggcaccattcaagaccctcactcctaacgagacagggctctttccactcttgaaacacagtttttccccatgtcagggttttgcacaaggtaacaacttgtctttgaagcttcatagtttggcttgttaatcaaatggttccttttccatatttaagtcatcactttacatttcattttcttggagaggtcttcgcatgactccaagctatcaccagttatgtgctatcgtagaacatggtttatccagaaatagtgataactttcatcactattgatcattctttggttttctttacatttattttatatcttaaacactgtaatataaaagacctcagggatggaccatgaattttatatttagcacaatacttcagaagatccatactatcctttttcttttttattcattttattttaaaattttcattttgaactactttaaagcttacaaaaatatattttaaaaaatcaagagttcctatatattcttcacccagcttcttgactgctaacaccaatctaagagtacagttactcacattaggaaattgatatggaattagttacttacctacatattttgttcatggttccactaatgttttttaactaggatcaaaatcagggtcacacattgcatttatctgctacatttctttagtcttctttatctgggtgcggtggctcatgcctgtaagcccagcactttgggaggccaaggcgggcggatcacgaggacaggagatagaaaccatcctggctaaaacggtgaaactccgtctctactaaaaatacaaaaaattagctggcgtggtggcgggcacctgtagtcctagctacttgggaggctgaggcaggaaaatggcgtgaacccaggaggcggagcttgcagtgagcagagatcacgcctctgcactccagccttggcaacagtgcaagactccatctcaaaaaaaaaaatgttaaaaaagaaaattcagcttttctttttgtctttcatgcccttgatacttgttttttgtagattattctgaagtttgatttttttctaatatttcttcatggttaaattcacataatatattttggcaagaatgccacaatgccgaggttgtccttctcagtgcatcatatcaggaggcacatgatatcatcgtgtcctaatactgttgacattaactctgatcacttgaataagatattgtctgccacatttctccacttcaaagttaccatttttaaaatcagtattttgttgagagatacttggagattatgtaaatatcttgtttctcataattgtatccactaattttagcagacttgtctgcaacaattatatggtatttgccaagaaatgagaatctatttccactattctttctatatttattgattagaattctactgtatggaaaagctttcctttgtcccacttttcttatttatccaattatttatttatattagtgtggattcatgtgtatttggtttaattaatctgaataatctattgccatcattatttattcccttgctcaatttatctcagtttgtgtcactgagagccacttctagttagctcctatgttctttggcatgtctccatcattagttgagacttccttattttcttaacaacaacagatgtctcagacccattttgttctttctgccgcatgcacctagaatcaggcattgatccaagcagctctgtatccttttaacgaagaaaaaagtgaatccaagatttgaatgctagatgtgctgattgctattaaaatgttattgcttctagtcttagtggttaaaattaagaaatatacacacattcagccgggcgctgtggctcacacctgtaatcccagcactttgggaggccaagatgggcggattttgaggtcagaagattgagaccatcctggctaacacggtgaaaccccgtctctactaaaaatacaaaaacattagctgggcgtggtggcaggtgcctgtagtcccagctacttgggagactgaggcaggagaatggcatgaatccaggaggcagagcttgcagtgagccaagatcaggccactgcactccaagctgggcgacagagaaagactccatctcaaaaaaaaaatatatatatatatatatacacattcacacacaaacatgtgcatctaggtctatttatatatctacacattcttttcaatttctatctaatgtagaaaaaaagtaaacttaagtatatattgatagttttgattctgattgaacaccataagtgttattctagtctccactccccttcatttctaaattctttttctaaaacagaatcacttagttttgttttagttaatatacttaatataatcatttgctttttatttttatttttttaaatttcaacttttagatttgaggatatatgtgagggtttgttacagagtatactgcatgatgctgaggtttggggtatgactgaacccatcatccaggtagtgagcatagaacccaagaggtattttctatggcactttacacattctagaaaactggttgttaattagcacaagcacctataatagtgcctgatatatttaatactcaaaatatatgttaaattaaaaacaaatgtataaattaatggttgactatcataataattactcaaaatgtaacataattccaaaggagaaaacttttttctaaaaaggctctctcaattgctctttctgatttattattttccccaaatctgtagttgcttcattattgtttggaattttgcattagttgtcaacaaacaaaaaatatggatcataccacagctctttcattgctttcatttcttgagatatatgaatgtatgtgatatctttgatgtcctgtattttatctttattgctttttgttacttaagaacatctagaaaagaagataaatattaatcatgtcagaaattatcaaaggttgattacaataaaaatttctctaatgtgataaccactcaaaaacttccttcttcatcaaaacacagtattttttaaaaaatagagtgcttcatttttatttcacagaaaataatcaaatgatagccataatattatgaactagagtcacataggctattctaataatactttttgtgaaagaagtattgaggaggtcttaggaccaaagaatatttgtttaatagtgtcagaattcattttaacaccataaaaaggatatgtatttgttcaatttcactcactgcacaaagaattagataaaagaagattttcagtaatagcattcattttgagtcttaccaatcctttcagttttggtataacaaaaaggctattagcttttactctgttgtgttgaattttgatgatttctgacagtcttcactgagatgctcaaagagatgagacttgccagtctaataacttaagatctcattaaatttaccagcaacataaaagctatttctgcctcttaactttttgatgtgttgcctttttctaatcctcttctcaggacctatttgaaagacaataaaaattttgtttttgtgtgttgaaagatttctccattatcaagagagtagtcagttcttaactttagaatgattgtatatatagatatgaaaaataaggaaacaattattaagaaaactaatcaaattttgtactaacatttagtaattttaacaaaattattgtgcattgtattttgcagcatttatgcagaggatatactaacctgtttaaatttttagacacaaatagtagaaaatagaacatcatcattttcaggagcaaggaagtaacctgtgaaaaagtgaatgcctttcttcaaataatatgctaatgaaaggctgagatattaatgtccaaatattataaaacgttcattttaatataatgttttactttatatttatattgtattgtataacaaagaaatgtgagtcttcttacacctgagaacttgaactggcaatctacatattgttgttgaaacaattttaaattaaacatacaatgagagggaaaaatgattctgttgcctcaattttaaaaggaatattttgaagaaataattttccatataatagcttgttatgatcttgccttttagcctccctggataaagaaatgcatacttataataattgaaggaagacaattttccttgttttctgcaaattagaaatatattaggctattaaatacataattcaaaatatacagaataaaggtattatagaacctaagaattatataaagaattatatacataaagtaatgaatacatatacaaatagtataaaaatactaaaaatagtatttgcttattgattaattactatgggtattatataactcttagtttctacattgcctttctattcttagttattataataggtatattataattactaatacgtataaactacttatagtttatatgaatgtgttatatgtacatgtatattataataactaatacctataaactatttacaattatacatattataataactaataaatataaactacttattgtcaaaactgtttttaactattaaaagataaagcacacagatatgttttctttactaggtattcccagaagcactcataaaactcggagttttcatatagcagtgattacagacttgctatttttattattcccatttcatagattaagagcacaagactcatattagtgttatttagccatgtcacagagccagttcccagatattttttccacttgttttgtcatgaagaatgagaagtagaatcagcatcaagtttgtgctaaacaagtacaataataagaaagcacagcaaatgctgactagactgtaagaatatttttgcttttaggctacccaaaaaagataagatatatgaggtgatcaaagtgaataattatataaacaagaggaattagaatatgaataagccaggaaaaataggaatagtccaaaaaaacacacacacccatttcttatttaaacttaaaaggagacaaattcattcaatctatatatatttattttgctacctcaatagagataaatatcttctctaagaaaaatcccactttacttaatatgtatcacatttacctaacaagtaacatattactaaaacagagagcaaccagtgttttactcttttttttttcagagattttttgctcttgttgcccaagttggagtgcaatggcatgatctcggctcactgcaacctccacctcccaggttcaagcaattctcctgcctcagcctgccaagtagctgggcttacaggcatgcaccaacatgcctggctaatttttgtgttttttttttaatagacacgggatttcaccatgttggtcaggctagtctcgaacacctgacctcaagtgatccacccgcctcggcctcccaaagtgctgggattataggcatgagactttgcgcctggcctcatttattttcatataaaatatagggtcaagtatgttgagatattaattacgctatattttgctcagtattgcctgagagttggattattattttttttttttttgagacggagtctcgctctgtcgcccaggctggagtacagtggcgggatctcggctcactgcaagctccgcctcccgggttcacgccattctcctgcctcagcctcccaagtagctgggactacaggcgcccgccactacgcccggctaatttttttgtatttttagtagagacggggtttcaccgttttagccgggatggtctcgatcccctgacctcgtgatccgcccgcctcggcctcccaaagtgctgggattacaggcgtgagccaccgcgcccggccggattattttatcattgtagagaatagcttctaggttatgagaatattaaataaaataaactggagagactctcagcagcaaactatggtatgtaagtatataggtaaatatgtatctatctatctatttatctatctaatctagcctatctatctatctatctatcacctatctatccatctatctatctatctccttttctttcatttatgtctggatctgtaccaaacaccaggcagaggagttaggagaagtaactgaaaaacccatgggtgacatcaccaactaaaacaggtgacaaataatcagcataaaacccaggatacaagagtaattgtcctaatcattggcagcatagggccagtaccagctggacttaatggcaaagataaaatgaagataaaaggaagtattgtaagatcttaatatcaataaactacaacaagaaatcatcaataatgctcactcccaaaagaaaaatacttaccctgaagaaaaacaattggaacaaaatcaaaattaatcagagaatcagataatctgagacaagtaagataatttttagaaaataatttttagaaaaaaaaaatttgaaggtacataaaatcaaatagaagtggtacaaactatagtaagagatatagagtataaaaataagagtaaaaaacagaaattgagagattaaaaacatctaaaaattttctaaacatagaacttcggcaaagaatagtaatacccatgtaacggttatttctaagaacaaaaattaaaataaaaaataatattaattatttgagcatgaaggtaaaaggataagaagtttatattgataatagacttcttgatagcaacattttatacaggatgataatcaagaaatggtttaatgattatgaaacagataacacagtagcgagatgagattttattcatccaaactatgaatcatgtctaaggaatgtagaacatcatgaatatttatgattttaagaaacattgttcctgtgatggcttttttagaaatgtcctacctactgacaagaagacaaacatcatgtgaagcttctggataaggactaaatatgtttaattttataattaagaacaagtaatggggattaaagtgacaaaacatgatgctattaagtgtgttaaacatgaagaaataatgcaactcaacaacaaatggaaaaaaggagaagaaaaagaaagtagacgaatcttaatgactatctcaggagtatctaactgccattaaaaaaatatggaattaaagtaaatgttaagcaaaaagagagaagaaaggaaagaaagtttactagaatacagtattactactcattgaagaaatcaatagacagtattcaaacacactagaggactagtatattttattataatattattataagataataataagaataaacatagaaacatttataaataccaaatgagtatatcctgcccctcaaattaaagtgtaaatacagggcaagattttatataaattatttatatagcaaaaacttatataacagaacttaacaccagcataacaggtatatcaaagacacaaatgggcttaactcaccattaaatggcatacttttagattggctaatggagcagaatccaatctattctgtgtgcaagaaacatattgaacaaggcaattcagaatggtttaatgtaaaaggaagagcaaagatagatcttgtatgatagcaagatcctgaaatagttgtcagaattttgctatgagacaagatagaatttaagacaaaataaatttaacaggataaggaagggaaatttattctacagaaggattcatgcttcattctacattaaaaataaaatatatattaataacatacacaaaattacaattttcataaagcagaaagaagttgaaagaagaaatagacattaaaactggagattttaacatagcttattaattggtaagtccttgaagaatgcaaataagcctcacttttactaattaaaaaaaattaacacaaatactgacaaagactccttcatcaaactttagtcagatttttgagctctcgtctcaactagatcttcacctaggccccttgcctagtctccatagctcacttttaacaagaatccttaagtccatatagacagaatcttgatatctgatcaccctgagctgccttcagcaagaatcctgttaatttggtttagcaagagttcccctacttttgatgtctcctcttagtaattttccatccactgaccccctcacactgctcttttgctataaatttccatgcgtgcttgtatttggaattgagctcctttctctactaaagtctcttttcctgtgttgcaataatttctgaataaaatctttctttactgctttaattaccctctggctctggttctctttgacattactctttgaagaatcactttaggggaaaagaataaatgcaagaagacaaaggcagagactattatccaaatatagaatggagataatgatatcatactgaatgggcaaaaactggaagcattccctttgaaaactggcacaagacagggatgccctctttcaccactcatattcagcatagtgttggaagttctggccagggtaattaggcaggggaaggaaataaagggtattcaattaggaaaagaggaaatcaaattgtccctgtttgcagatgacatgattgtatatctagaaaactccactgtctcagcccaaaatctccttaagctgataagcaacttcagcaaagtctcaggatacaaaatcaatgtacaaaaatcacaagcattcttatacaccaataacagacagacagagagccaaatcatgagtgaactcccattcacaattccttcaaagagaataaaatacctaggaatccaacttacaagggatgtgaaggacctcttcaaggagaactacaaaccgctgctcaatgaaataaaagaggatacaaacaaatggaagaacattccatgctcatgggtaggaagaatcaatattgtgaaaatggccatactgcccaaggtaatttatagattcaatgtcatccccatcaagctaccaatgactttcttcacagaattggaaaaaactactttaaagttcatatgaaaccaaaaaagagcccgcattgccaagtcaatgctaagccaaaagaacaaagctggaggcatcatgctacctgacttcaaactatactacaaagctacagtaaccaaaacagcatggtactggtaccaaaacagacatatagatcaatggaacagaacagagccttccgaaataacgccgcatatctacaactatctgatctttgacaaacctgagaaaaacaagaaatggggaaaggattccctatttaataaatggtgctgggaaaactggctagccatatgtagaaagctgaaactggatcccttccttacaccttatacaaaaatcaattcaagatggattaaggacttaaacgttagacctaaaaccataaaaaccctagaagaaaacctaggcattaccattcaggacacaggcatgggcaaggacttcatgtctaaaacaccaaaagcaatggcaacaaaatccaaaattgacaaatgggatctaattaaactaaggagcttctgcacagcaaaagaaactaccatcagagtgaacaggcaacctacagaatgggagaaaattttcgcaacctactcatctgtcaaagggctaataaccagaatctacagtgaactcaaacaaattgacaagaaaaaaacaaacaacaccatcaaaaagtgggcaaaggatatgaacagacacttctcaaaagaagacatttatgcagccaaaaaacacatgaaaaaatgctcaccatcactggccatcagagaaatgcaaatcaaaaccacaatgagataccatctcacaccagttagagtggcaatcattaaaaagtcaggaaacaacaggtgctggagaggatgtggagaaataggaacactattacactgctggtgggactgtaaactagttcaaccactgtggaagtcagtgtggcgattcctcagggatctagaactagaaataccatttgacccagccatcccattactgggtatatacccaaagaactataaatcatgcggctatgaagacacatgcacacgtatgtttactgcggcactattcacaatagtaaagacttggaaccaacccaaatgtccaacaatgatagactggattaagaaaatgtggcatatatacaccatggaatactatgcagccataaaaaatgatgagttcatgtcctttgtagggacgtggatgaaattggaaatcatcattctcagtaaactatcgcaagaacaaaaaaccaaacactgcatattctcactcataggtgggaattgaacaatgagaacacatggacacaggaaggggaacatcacactctggggactgttgtggggtgggggcaggggggagggatagctttaggagatacacctaatgctaattgatgagttaatgggtgcagcacaccaacatggcacatgtatacatatgtaactaacctgcacattgtgcacatgtaccctaagacttaaagtataataataataataaaaaataaggaatggagataatgatgatggtaatgtcttggatactgattgcaatggactgcatgtctgttgccaccctgtctctgaaacttataggtggaaatcctaacccttaatatgatggtattaggaggtgggactttcaggaggtggttacatcatgaggttggagcccttctaaatggaactagttcccctatataatagacccaagagagttctctcactctctggcatgtgaggatacaagaagaaaatggtagtctgcaacttagaagagagatatcactgaaacctggtcactctggtaccatggtctcagacttctagcctttagaactgtgaaaaaattgatttttgttatttctaagccacctagtctataggtctttgtgatagcagtcagaattgactaaaacagtaatagtagcaatggcgatggaaagagtgaatgcatttgatatatactttgaagaaagaaataacaggactatcagtcatgtggatgtttggcatgagagaaatgcaagatggtaattaaacaactttgtgtctaagtctgaaggttggagaataggcaaaggtaaaagtaaagctatgggagttaccgacacttatgagccctttaaaggaattatttatttttattgttaaatcaccaaggaagggttgaaacagacaatagaaattaatgccaaatgagctgaaaaaaaaatgtgttgcaattaagttgggaataaaaagctgaggtggcaagaagaaaagcaaggttggtatatttttaaagaactctataatgaataatgttttgaagaggaagaaattttcaacaatttgaaatgctgctgagactttgggaaatgtgaatggtgcccacgtagaagttattgacagtcattgaaacaacactccctttagcattatgtataagaaactagattagaatgaaacaaatggattcttaattccagaattgtggagaaatagaaaatctaaaaacttattggaaacacaagaaatgcaacatgaactacaataaccatccatttcaataaaattagaggatttcaggttcaggtcatgataaagtagcacaaactcacaccctgaagttggctataaaagctgggcaaaatatgttagacaattgttggaagacacgggagaacaatcaatgtatacagagcttgagtgggattattattaaaaagaaataattatagactataaattacattcactcagacgtttttcctctaataacatttcccaaatagtgatgtgaagaaagaaagcatacacagaaagtgaaattttactgtgttgaggtgacagagattagagttcagagtatctagtgtgtatggggctcatgagacaaatttccaagaaggaggtaaccacagagagagagcctgaatatctgcatacaaatgccccttaagtgtggccagtatcaaagatatgtatgcacaaggtgagacgtcaagaagcctagcagaaatcaataaatgggaggttggagtgctgagtttagatttcagctagtggtttagagaagaaagaggttgtggttcaaacactggtaattacagaggatgagatgggagtgagaaactatatggctaaatgtggtcattcttcaggttttagcttttatgcagggtgctatatgctggttgcttccaacactgaaaaagttattatttaattacctacatataaaagatgaccatgaataggcataagatgaaagtatgtcattaatcaaaatgatgattaattcaattctctataattgagattcaattaaaaagaatattattcatcacattcacagagtaaatgagaaaaatcacataatttcagtagatgcagatacgttaagatctgtatcctaacagatattgatacaaagaagtatttgataaaattcatcattaatttactgtatatatatatatgctcttattaaactaggatttaaaaggcacttaattaagttgataaagtgtatcttttgaaatcctataaacaatatgttatgacataataatgtgggaatgttagaagacttgcttttaaacctgggaacaagaagagattctctgttattttcctatgctgctgtaacaaattgccacaaaatgggtagcttaaagcaacacagactttttctcttatagttctgaaggccaaaaattcataatcagtatcagtggtctaaaaccaaggtgtgatcagcaccctattttttccagagaactcaggggagagtaattctagaaattattccagaaacgcagcttctagaactacatttcttgtctcaaaggccacttcttctatcttcaaagatagcagcgtataattttcaaatatttctccacttccatgatcacataacctagattctatgtcaaatctccctctccctcactcttataaggacacttaagattgcatttagagcccaccaagataattcatgataatcttccatcacaaaattcttcacttattcacatctgcaagtctctttgccataaaggttacatttacaggtactaaggattaagacctgacatctcttgaggccattattcaccctaacacagatgtcctctcttgctgcttgttttacacattgtacttttctgaatacttttgagaaagtttgctctaaagaagaaaaaaaagtagttctatatttgtgagacatgtagactgaggagaatgactatttttctaatgtgatatataaaagcacatttatgtgacaatagcaataatagagaagataaagttatgcagaagggagaagatttgacaatagcaagcatgaaagtcctgcaggagaaaagtttggatgggatactgaataaaattgtaatattactttttgatgcatacgttcacaccattttttcacaatgcttcctagattgctctgtatttctttcccatctatatatatatacgcatatatatatacacatatatatacacacacatatatatacacacatatatacacacatatatacacacacatatatacacacacatatatacacacacatatatatacacatatatatacacatatatatacacacatatatatacacatacacacatatatatacacattttgactgaaaatgattgactaggatgaaagaaaatgagaaagaaaaacggaacaaggaattctcaattatataaatagaatattataattagtaaaccatgaataaaagaaggcatatgggctgggcgcggtggctcacgcttctaatcccagcactttgggaggccgaggtgggcggttatgaagtcaggagattgagaccattctggctaacagggtgaaaccctgtctctactaaaaataggaaaaattagtcaggcgtggtgatgggcacctgtagtgccagctagtcgggcggaggctgaggcaggagaatggcgtgaacccgggaggcagagcttgcagtgagccgagatcgtgccactgcactccagcctgggcgacagagcgagattccatctcagaaaaaagaaaaaaaaaaggaatacttgataaaaaaggtatccatatatcagataagaagatgtaaaatttatgtgctatctacttctggaatttccaccataagggaataataatgacgtaggggttcacttaaaggacagaacttgtacttggttacttatgtacacaatctctgccttacttgcttttggtggatcgtattgtgtcatttcaatgtggccattattgtcttttatgaacatatacaataaagtaatatacctttacataatgtctacatctctactgtaatttaaactttaatggctcaaaaatgctaaattacaaaatagagaaagatgtgtgttaaatgcagattaatataatttaaataatattatatatgataagggtttgtaaaacttaactattaagatggatagatgagaaagatagaaacctagaatacaatactagaaaatctagaaacatagtagagatgagttcaataattcaattctatataagaggtcatcaaactacaaagcacagagctaatcaggccactgatgcattttggtaaacaaagttttattagaataaagtgacatccttttattttacttattgtttatggatacttatgcactacgatggcaaatactggtacttgtgacagagatcacatggcacgtacattctaaaatacttaatagttggcccttcacgaaaggttttgagagctactgctctaggaaatctcaggttcaatgtcagttatgaatcagctttgcttagcatagccatgtttgaaatcctttccaatgacaataattgttactgcctctagacagaagagtccaattattttaaggtttcattattaggaatggttcatttaattaagccatagttgttacttcaagtataattaattagtgaaggtatattgcttttatgggatataattaataggaaaataggttactgctctgtggcatagttagaatttaaatgctgtggctttatagaatttaaaggtagggtctgtttattatgaattatgcctcccatcatctagctcatgtgaggtagttctggaatagcacattatttatgtttgctgataatttattttagatataatggttggttaggaaggagttcacggtgaagaaggtagatgtcacaaaaacatgcctgaaatggtgatggagaagacgaatccgtgtatttattcatttaataagttatgttgtcattcaagcaaataaaaatagtctttactctgaacattcatataaaatatctgttgtataattaatcgtgtgcttctgaataaaatagatgaaagcatagtttgcattataagcattaattcattaaaatttaccctgaacattgttatttggttttattagcaagaaatatagcacttggaatggttttagtaaaccatacatgtgaagaactctagatcataaagaacctaaaatacagaattttcagcattattataatctatttaattatacattcaggtttatttgttactgaaacttagtaacttgattttgggagttttatatcgcttctgtgtcttgtttgtttgcacaagtttgtttatggtgaagtgcaaagtattttagtaaaagggatttgagccacagatgacaaataattacaggaacatataaactacacttggactttaaagcaggtttagattatattactttggttattattctttgttttcaaaagggaatgatgggttatagctttatgcccaaatatttaggcaaaacacgacaaaagaagggtgaagagaccttttatcgaatggacaaagtagaaggtagcactcataaaatatactgttttgtgtaataagtgaatggaatctttacacaattttttgctagggttaattgtttaggaaacttttctaattggcaactacttcatagaaaaacttgatccagacctatatgtggaacttccctttatattaacttgctgaaattattaaagttaaaagcttgtttttccaggttgatactctcaagacctacaaagaccagcacattgaagcaatcagttgattaccatcatgatgcctgcgtatgtttatttcatgtcagacacacctgaggtctgtaattgaatacataaagagtgcaaccatggaagaaacaaggttggcttgtggtgctcctatggcagcatcaacacaacttcaagtgcaccatgagcatgagcactgccaagaaaatatattggctctcaactctcagaatactgccatgtctagaacttttggccttgccaaccactgggcagtaagagacagtaacaaatcacagcagatactgtttccttagagcaattaaattacatcagaaaaactaagctgagtgataacaaaacaatttctaaatgtcaggagcctatatcaattcattcataagttgctcatttcacatgtccttggtgttgcttatgattctactcatgggtcattgtcacctttataccaggatctagaggacaaagcagccactccagaacattgaaagttactgtagtcaaggaaaaaaagaatgttgtgaggcacgctctgaatttttgcctctagaaggaaacagacactttagtctactaacatttcaataagcaaaaggaaatcacattccataactgaattaaacagggcagtgagctatatcctaccatgtgtgtgaagaagccaaaaaatatgtaagcaatcctaatgtttatcaccttaaatttatccatgcatgctactgtggtcactttcactgtaaaagcagtcattgcagaatcatcaccagtatctcagtatattagtcagggcaattaatattagtttctgaaccaaactgcaaatatctgtgacttaacacaattttttttcttctcattcatataattcagtagaggattaactttctgaaattccttaaacgttttcacagaatcctctgcatttaatataaagaggagtatgagaagcattgcatgaggtatcttatagctcagtctaaaagtgggaaatataacttctacctacatttcattcaccagtgaaatggtctcatcctacctgcaattgaggctgaaaaatacagcattttcttgtggtccaaagaaagaaataatgttacctcaccaatctctgtcaaggtcagtccttctgatgccaaaatacctgctttaatcttcctcccattataaaacacactgacttctctcaaaatgaaaaatgcagagttctttcaaggtctggcatccagctcaaaatgtagtatctctggccactcataattctcccagtgaagtccagataaggtcctcatttctcagtaaaatctaaacttaaaagaataaatatgtgtcctgtgtacaaatatgcaacggtgaagtgggaacaaggtggcagcaataaatacatctctatcaccacagtcatttgttcttgactatttgcaaatcatttcaggaagacatggtgaaacatcctacactgtgagtggcagaaccccatgtgcactgcaatctcatttcctaccctccagaggagtatataaacttttcctacataaataatggccacatttttgtatcgatacattgtaagttctaagatgtgtgtgtttttttttaagaggaattaaaatagaaaagcatatacctaaaagatgttcctcgggatatatctgcatatattctctactcttgtcattttaaataaaaatacagtggtcccttgatatcctcaagagattgggtccaggaccccagaggataccaaaatcagcacatattcaagtaatcctgtggaaccagagtatacaaaaagtcagtcctccatatctgcgggtttttcatcctgtggctactgtattttgatccacatttcaatgcagatgctgatttttttaattaaaagaatctctatataaggggatgcacacagctcaagctcatgttgttcaagtgtcaactgtactaacttttttatttctgtccaatataatttaaataacataattctgtgaactgcatgtcattaattacatatactaagaggtggcgtaacaatgtgtttaaattccaagaaatggtggctagcaaatttaattctcatctctgctctgccacagacaagttctgaagtcttgagcaaatcatgagtatctatctctagcttactcatcttaagaaggagccagtaagtagcaattatctttcagtgttcttatgagaagtaaataacctgtacacatcaatgctcagaacagagactgccatgtggtattatgtccggagttggttcctgcctgtgggtttggtgggttcgtggtctcgctgacttcaagaatggagtcatggacctttcccgtgttacagatcttaaagatcacgtggacccgacgagtgagcggtagcaaggtttattgtgaagagcaaaaggagaaagcttccacagcatggaaggtgacaccagcagattgccgctgctggctggggtggccagcttttattcacgtattggcccctcccatgttctatttttgtcctatcagagtgccctttttttcaatcctccctgcaattggctacttttaggatcctgctgattggtgcattttacagagcgctgattggtgcattttacagagcgctgattggtgcatttcacaatcctcttgctagctacagagcactgattggtgcattttacaatcctcttgctagacaaaaaagttctccaagtccccactccacctaggaagtccagcgggcttcacctctcagtatgttctgaataaattgggctattaaatatgtgatatgaattaatcaagcagagaaaaagttactagtgacagggaaaaggagaaaatatgtattcaatattattttgtaaacaatttataaatatgctgcacctatgagtttcttctcagtaccttagaaactataacaccatggaaaattttggatagtttagggaagtgcattatttggtaatgtgaaaaataagatggtcgtgataaagcaacttgggaaaaaagaaatggcatgaatcttgagaacacgtaccttctgagaattttcatgtttagaaaagagcaagctaaaaatctggaagcgtatttgttcacaggcaattttcaattggtctcaggcatttctgtgcatcttgcaaataggcactagcttcacatttattacaggttttcctttttaaagatctttatatagtggatagccctggaagatcaagatattgtttatttatggatgagagaacagatttgtttattttcaagtaaaacgaagatagtgtttcctccacagaaaacatcagacaggtgtgcttactgctcatttattaaagatttaagtttcctttacttggagttcttcatctatgacacaaactgtgtgtagcatcaacttgaactccttgtcatcatctccagtaaacttgagggaaaacaggaaccagagcaaagatgaagctcgtgcaactctgtgctgtgctgcaaataatggaagtctttctgtctctgaccaaacagttatgtgtcttctgccagcatccataaaactgaagcaggctaacttgtaagctcagatccttcacagttcttgacaatagtccctaaaactgtctgcagatgcacatcccttggaaaaattttgcatccttttaagaataattaatatcctagttaatgacaactatatgacaggatagatcactttaagcttctacccagattactataacttttaggtaaataatgtatatgccactttttctaaggttatctagccattttcgatgtagaaaacaatattgcgtaagataagctgagcatatttttcacttcgtttttgttttgcaaaacaattttattggttttgttaatgccccaatcatcagtactgcttggtataagagccgagtttgaagaattatcatgttgcaaatgtattttgttcagttatttcaaattagtagacagaattgagaggtggaaaattttagaaaaatcttggttaatcatacttggaatttggttatgtaatatctctttctcttttggggaatacaaaggttcataaactagtgataatcttcactcttggaaccattagatgctatcatgatgttagcatagaagataaatttataagttgcagtgaggtaaggaaataaaacacgtaagtctttgaaaacaacactatgacagtccttgcaggctaaaacttagacaccaaagcattttttgttacttttggagaataaaagaagtgtgcccctcaatgtcttgtgggagaaaatatatagtttgatacacttgtcaatatctctaactcaaaaatgatgagtataaggagtgacccttattgtagtcttatatttctctccaacaattaagagagttggtggggatgttttttccatgagttcatcccaggccccaggagattttcatcttgtattctctttataatcctatcttagtgtttcatcctcatggctaagttcagcaatacttctgcattccagacagtaaaatgtgtaagaagagatgtaaaaacaatcggctttgcctttatggagattaacttaaatttatgctcataatataattcatattatatttgatcaaaattaatcactgataagagactatagaaggtaatctcctgcttgtggtcatatgtacttaggattctattactaaacaaaatgaaagaatgcattatatgcacaattagtggtctctagtacaaagaaattaccaggtcatttccaattctcaatattaaaaaaaagtttatttcttactgcactatcaaattggaaaggtcagtacaggggcattcaataatagtaaaaatatgaataacaatcatgtataacaacagaatcatttaaaaagatgtatatttaaaatgtgattattgcattttatttcccctggcagaaaataataaactggagaaaaatcacatttgattgatgtctgttacatggatttttaaaatttgtatcaatgaatgctttttaaaggtaaactaattgaggcctaccgaaggtaaataaatctttagttattttggtaaatatattttacagtttcattctttttcaacttaagttagataataggtactatattctctcctaatgtaaatgtttacgagcattgaaactccatctggagaaaatagaaacacttttaatttaaatgacatttgaagaaggaaatgtataaatgtattcaaaactgtaagtgaaaatgggaaggtcctattaaaaaaaaaagaaaggacaaacactttccaatgacctttctataatattagcaaatttattatgatctgttatgaaagactgttttgccttccttgtttctactgtctcaactgcctaagtactaattcaattgaaaagtaacttcaggtatgggtccattttaatgtccctctacaagatctgcagtgccattaattacaatcatataatcttagagccaaggacccttagagattatctaatcctattctattaatgcatgatgaaatgggcttagcaatctgtctaaggttacacaaattcaaaaacacatagaaagttttcataatcaaattaaattaaaagtataaaacaatgtcactaatttatgtataagaaaatattaaatatcattttatatgaagtgattctgataattttaatgagttcataacaatgcttctaaatatttcaaaattttagtttatcatccaaatatgataatactatacacttttataagtgagtcttctacagtgaaaattactaattataggaaagagaaaatcatggataaatagggttgtatcaaactcttaaaatgtacatgtggaaatttaaaaatatcctcttgccaaggggatgttgatgtcattccataacaggattgacatgtgtaattaaaacaaacaataaaaattaagaatatataaataatattttaaatgcttgaatttgttatttataatgaatattgaaatttatttagtgagataaaaggttaacaaattcttgaatataattatactacttttataataaaatgcatccaagctgaaatctcacttctgttgtcaattgctttgatggttctagactcatttccctatttttggtgagtcataagatggatgacgcacatgctcaatagcaggttatgttcatggctaaggtttatcatagcaaaaattacagagcaaaaccagttctattcatatttttaataaatagtaaactaattatatcttgttattcctatgctttgtctatcatacctacacataaatataagcactggtaagttctggttccaaacatagcttatatatgaatgccataatcattcaatatgcatacattagccttgaattttgaagattaaaaattgtttgtaaaactatctagaaaaaatttattatgattacagccactattaggtttcaaaagggttcatcagaaatctctgaggtatataatggggaaagaatattttgactaccactttaacaggtctgctatttaataatattagtttctttttaattgatgtttcatggacatccagaatactagctataaaatcatatatgctgcataatgcaaggaaaacaaaagcacctgtaaatattacagaagactatacatgtatgtatatcattgccataaaatacctatatacatatatgtatatacacacataattgttttcacaaccatgatattattacttacaaaagcatgcaaatttagggagatggctaaataagttatggctttttcataaattgtaagcctattcattataaaatattattgaggatcaactttcatttgttccccaacaaattattgagcatctactatgtatattctaggcccatttctagggactggggaaaaaatagtgaaaataacattcagaatgtcttggcttcacagagctgttgttccagtgttgggagaaaaacagtaattaataccacaaagtatcatgtgttgtatgccagatggtttaagttctattctaaaaaatgtggcaaagaaggggaatagagagttctgggcacaagaggtgctggatactgaacaagatggttgctgaaagcctcactgggtggtatcatctgaatacaatgagtggttatgagagaatgagccaagagcataattgagagaacatattttcagggagcagaaatagcaaatgaggccttggtgtatgaacacacccatgaggttccactaaggatgccaatgtgatacagcagaggagatgaggtcacactccatggggagatggtcacataaagcttcttagaaaatggtaagaactttgtttatttaattggcagccatgaagggttttaaacagaaaagcaatcgcctctttaaagaattagcagtaacagtttgactgatctgtgaaaatagaccacagcatagcaaaagagaaaacagggaaattagcgaggaaagtatcgtgtaaactattgctgaagctgttctaaactataaactatgtaaattataaattgaaattgttctatgcaaacaagatatatttgaaccctgtatattagaggcaaaagtccatgatattggcaatgttttggcctgaactatgggaggaacagagttggaattactcacctgggtttaaatttgggaggagcaaatttgggaatagaggataggaaagatcaatagttttatttttaacaggcttaattttaaatagacaatcatataatatattttaaataaactattaatcataaaataatgtcaggctatattttaatactcacctatcaattataaataaataaaatgataagaaaatacataaaaaccgcaatagtttttgtaattagacagtggagttacttgtgattttaatgatgtaggaattattcagtttttaaataataaatctttattaattttataattatcaaagatgctataaaaagaaataatttttttattactatgctactgatgtatttccattgcattgactaacaaaattaatactagaattttcaaaagtatccacagtggttactttatttgcactgttaattcagctctttttaagtatgccttctcgttccctaattgatataattcagagactacacttggacacaatttaatgaataagcaaattaggtccagttattccaatatgaaattccttttaattatgggctacttttggagatgtagaataatttgaatgtttaatttggtgactcagtatgacctacttcacattgttttatgagtgggtgaaaaatataagtgctaggaaatgtgtaccagaaataatttgtcatctaattacatttcagaacattatacctcctcaaagccttgtttcggcatatatctcattttaaaaatctatgttgcatatatgtttacttctttaaaattttaaaaatgtttgtggcattcacataaaatacagaagagactagcaataagtgacatacatgtacttcaggacctgaaaatttatatatttttttctttccttaaaaagaatatattcaaatacatcatgagaaaaatgtatagctttatagttaggataaacctttaattcaagtgctgttacttgaattaaggatgcacaagccccggactctactccacaaaccccacccactcttctcaccacataaatacctagggagagggatctgtctgaaggaacctttcccacaacagcctttattcaaaatgacacacctgccactttcttgatgcctactcttgtactccaactgcagtgtgattcattacacacagtttgcttgtatgttatatgacagtgattacatcaaggatttgggtactagctaactgaactgatatatttgaaagtactttataaaacagaaagtgctgaataaccattaagtatacagaatgatttggcaacaatcatatgtagtaccatattttctgaaatatctatttcttaaaaaacaagtttcattaagtatattatttgctgaataatctctcaaaggtcatgttttcatatagctactattattgcattttgaaatcaaacattattttctttgccatttcagagaagcccttggtaatccagcccgcaagtgcaattcatgcgcatggctctaaagagaaatgggcaaacaaaaagaagattaactacacattcaataatcatttatttattttcttagagatatctacagtagctctcttttatccttattttaataaatgctgacgtacagaattagtgagatttttggtaataatatttttttttttgaggcagagtcttgctctgccaaccaggttgaagtgcagtggtgcaatctccactccctgcaacctccacctcctgggtttaagcgattctcctgcctcagcctcctgagtagctgacaggtgcgcaccaccacgccctggctaatttttttgcatttttagtagagatggagtttcaccatgttggccaggctggtctcactcctgacctcaagtgatctgcctgcctcggcctcccagagtgctgggattacaggcatgagccaccgcgcccatctgggttataaatttgttattcctcttgtggttgtttgggatgtgtatttgtgtgtgtgcacatatacatattattgaatttaccacgttactccaaaggcttttctttaactattttgcttgatgtatattcaacaatgatagtctcaaacaaacaaacagaaaacagaaacacatctgatttttcaccaatactgtttatagaatgaatctgtatagagtctgaggctattctgatgataaattgattataggactagaaaaaactattttgccattttacaaactctcattatgcaccttatataatagtgccaagttaataaatttgcttctatgtttatagtctgcaacagaaaaaacttatgaggtactattttccagatgaaagtgaaagtgatgacagattttatttctacacttaaattattaagatatacctttattatgtgagcataatcgattttattgcagggaaggcccttaattcagtaaaaaagacaagattgcttcttgaatattaaaacattttcatcttttcagttttgcttttcttgattatctatttttctttttactgagtaatgtatatcattttttaattaaatataatttaaataatattttacaataatctaaaatgcttctgaatacttcgtcaataacttttggatgttcaataacattaagaacgattacatttttcaaatattatttttgcattatttatatgtttgcatttttacaagtgttctaatcgcatattgcaaggccaaatcagaatttttaaagacttcattttattaacatttaattatagcaataattaagaaataaaataaaatgacataaaattttaaatcatatgaataaattaaacctatatatttaaattactttacaattttagcatttttcataaatatacagaaatttcatttcgtatctgttgttataattattacaatattaaaattatgtaatggaaaaatacattaagcatcaattaagacagcatacatctgttggcaaaagaaagagaaggtatatttgatttccttgattttttcctctcaaaattgagaaatagtttaattttataaatctatatccatttaaattacttaagtcaccattttagcctaattttttcattttctagatagattactcttcttttttcttaaaaaaaaggtatcatttattctggttacgagtaaaagacaattttagatgtgcaaatatttagatatgtaatcacaattagtatttttacttcatgaaatctttaggcgcaaactttgctgttctaaactaaaatttggattccaattcaaaagctaaagactatcatagtgtgattatcccaaatgaactcttttacctaacacttactgaaatttcaagataagtagtattgagattctacaagtcagtaagaggtcttctctctgtgaacttttaggttttaagggcacaaggaatttaatggctactgggctaaagaatgtaataaccactactgtgcatatgattttagtcatataggcaaaaagcctaggagttacattgtttggtcagatggcataagtacaattaattgcaatataaattgtcagattgtttcataaagctctacaataaattattcttcaccagaaatatatgagagaacactagaaacaataagtcctatagttatctttaaatgctaccaatttgatggtttttctggtgacattcctgtgttattttaatttgtattttctttaccacccatgaatcttaacagattttttctatgaaagttcagcactttgattcattcttctgtggactgactgcctgtgcctatccacttccctggctctcttgcttggtgtgtgcatgtggcttagttttagcaaatagaatatttgctgtccctgagccttagtcttaaatccttatacaagcactttttcttgttatcttacctgtttgtctgacttgggtgatgattcttagagtaattttggttgccaaatgttaaagttagtagaactactataagcctctgagtggctaaatggtagttatttctgtggcctgaatactcttatgagatattcagagagattgagagggaagaattatttttgaagacatggaatttttattttctattccttagaacagtttagtttaccctaaatagtaactacctattattttcctctgctaatttttcttgaggctcctaactttatcaggtgaattttaagatatctgtgaggctgggcacggtggctcacacctgtaatcccagcactttgagaggctgaggcaggcggatcacaaggccaggagttcaagaccagcctggccaacatggtgaaacctcgtctctactaaaaagaaaaaaattagctaggtatggtggcgctcacctgcagttccaactactcgggaggttgaggcaggagaattgtgtgaacccgggaggcagaggttgcagtgagccgagatcgtgccactgcataccagcctgggtgacaggcaagactatatctcaaaatacatacatacatacatacatacaaacacatatatgtaatgtataaatattacctttttgtcatctatttaacaaaatatttgctcaaatatatacttccatctgacaactatttaacattacttttctaatatttttaccttattgctgctgacttgatacatttttattcattccactacatccttgttattttggaagatctatcctttatttctttattaaggggtatcttcaattttttgacctcacaattagatgcataattttcaagtactatttgaaataaagataccttctattgtcttagcaaattagtcaatttctctacttacccctcctcaataagttgacaaattcaaaaaacataaatttccccatttctttttcaccactcccctccaagaaaccttggaaccagtttgttccaaggtttgttcccaccaaagtctagattatacaaaaatattttagaatgttaatgatatattgttagtaaaattcttctattgaatagtttatgataatttgtcaacatgaaatgttaggcagacattgaataccaactagagctattcatattctcttaatgggatttccattgagttattgatgaaagataaagtgatataaagaaaatgtgtatacaccaagtgcaaaatattttataccctttatgtggccatgaatattaaatcatagttatgggaggaaattgccaaatacatatattaggctgttaaaaactgtttttctgagctctggaaactgatggataggcatagcagaagagagcagaagcaagccaagaaatcaaggaaaagatactgctatataacaagaaataaaataaaagtacgtaatgtaattcccttagaaaatgaagttgggtgactgagaagatgtggagaacctttataccaatttcctttttctaatcagatttgattataaaacatcgacataaaatcaatatatgtgtattatattcatttcaattttaatttcaagacctaattttgctgtcttaaagatcatggataactccatcttatctcagtgttcaatctataattcattaaaacagttttcaaaagaattttcaaaatattatgattacaaccatacttaatcttaaattaggacatactatgtgataaatactatggtgaagtacttctcaataatccatattcttaaacacaacaagttctaggatcaatctgcttaaatttatatatttgctcaatcatttgccacataaatattttacagataaagaaactaaaacactttttttttctccgaaactgtttcagggctaagtaacttactcatgagcttggtaaaaataaaaattattagataccttgtggatccgttgcatatatttcaaatttaagtttttgaagcactttttgaaaagacttctttatgtgacatttgttcattaaaaacacagtgattctttttttgaaatacgatccaattgtaaaatatcctgtgtctagaaatgaatttattttcctaacaaaagtgtattaaattaattaattaaattctcagaaccattatttaaaccaagtttgttgatcctacaaccagtgaaaataatccctacaatgctaaaaatgtgtgtgctattatccatctatttcctagttcattaaagccaagttatcataatctggactttttaccaaagattttcagggatgtcaaaggtttttactcctaaatttaatatgctgaaatattactttatgttctatttatttttttcatttaaaataacatttttctctatgttgcgattgcaaaaattaacttatttacatatatacatgatgtcatgatataatctaggcacaattttggatatttccttttcccaatctgtttaacttacacaggtaatcaatatatgtaatcaccaagcaaaagaccttcattggtttctattttgttattttttcctctggaaaagtgtttaagatagttttaacatgaagaatagcgaccatattttttgcatactgttatttcttcaaagacgcttaatctatataaacaaattttaaaaaccctggtatcagttgggtaaaatctctgagatttaaaatatttactaagctactaaatgttaagcaacacgggattttgagaaattggccaatggcaaggattgtaagggaacaaaaacttggaaacaatgctgtttgtcgacatcttgaataatttgctgtgcctctattttatgtcacagtatttccacttccaggcctatacaaataaataaaatcagtattatacacagaataggtacacacacacacacacacacacacacacacacacacaagcgttcagatataaagatttcaactgtagcatcatttgtaataaacaatattggaaacaatgttggtatatattgctaagaaaatgtgttgagatcaatttagtataattatataatgagatatatgattatttcatttctttatggaatgagtgtaatgggaaaatccagtggaaagcttacgttaaagctaagaaagttaaatctttaagacctttcatatgtatgggtctttctcggggtcatatgagttttgcaaaatttgctgtgtaagatgcttaattaaaaataagaaaagccacacctgttttgactcccatttgcctttagtcatttatctccctgtcaggtagtgcgggtccagcctacaacacttttagtattcagctaaggggaagttgaatagagacatatttaatttcagttcattgaggttaatgtgtttgatttaaagccacttccatgtaaaatgaagttgtttctggcagttcagagactttctattgctcactccatagattcatccagtgtcgtagcacagaggtgcagaggcagagaatgttgtgagacacatgtcatgcagtacttggtaccagaggctgcagagaaggaaagaaacagctgcccttaacctagctctcctttccactaattcttaccgtggtggtgatgtggtgagaaccagatgtcctacatgtaaggggatctgctgtaggcaaagaactctggaaaaaagaacctgagcgtttttgtggaagagtgacccagttgctcttgacccccttctgagtgtgtctccatagtcacaaaacggaaaaaaaactgagttcttactttaaccatttggataaaaataaatctctctaggggaaagataacactagagtctccagctttgtaacttctgggatgcatctactgggtctcatcttctcttgaaatgtaaatatatatccctagtgaggtaaatccctcaggatggcccctaaccatgttctttctgtgaattaatttccagagctagttcttagcgtagagcagaagtctgagtaaaatttgttgagaaagttcttactatgcataaataactttatttacagcctaacactatccattaaaatcaacaagagaaagacaaactaatccaaaatgaccctgcaatcggggctctaaaacaatgcaggttgactgtaattgttaaaatgaatttggaaagtatttgaccttatctgttaaaattaagtatatgcataccctgtgaccaataattctgctactatcatccaacaggaacacataaacatattcaggaaatgtacaaaattgtttattaaagaattattcacaacagcttaaattggaagttttgcagttatccatcaagagtgaaataaacacatcatagcatatatataaatacatggagtattatcaagcaagaaggataaatggtatacccaagagagctttgatgactctcccaaatacatttctgagtaagagaagccatccagaaaagaatatatattgtttaattctattataaaagttcaaaaataggttaaaaaagtctatgttattagcaatcagaataataattacttgcagatggagcagatggtaatttaagggaattttattgtgaaatatgtacaatcactttgttaaaattaattaactatatactatttgtgtattacaataaaaatgtttaataaactatctcattgttgttatttacatttcttaaatagcatttaggcatgggtgaaaaggtttaacttgactggcatgaattgctcaaatactgtacattccaaagaggggtccctctgcaggactagaccttagtctaggagttcatctctgagcccttggagtattttgcttgataaaagtgttcttgttttcctgaagtcttgggccatactctcccagttcgaccagaaaaggttatgttatcaacgtgacttatgtgaacatctgtttttactctgggtgtaggaagaaagttgtgcttaaatgtcatggagctgaggtcaatcatatgggcattacatgactatgtgactgatcccagtaaacaccttcgacaactaggctccagcgagtgttcctggttggcaatgctttgcactttacatattgttgctgggataattaaacatgtccccatgcaactgctctgggaggggacacctgagagcttggacttggtttctcctggagttcacttcatttgtcttttctcttagctgacttctatctgtactgtttttactgtaatatactgtaacaatgagtactacagcttctgattcccttagagatttccagtaaattaccaggtctcaagtggtcttgggaacccctggcatattactgaacttaaagttttcagaatatctgtatttgatatattccatggcaagcactatatccatcatactttttcatttattgacataactccaaatatttccacatatctaaaattcaggaaagtaaccctatccttacctctgaggataaagcttgttaagtataggtaaaccatgataatttaaattcacctgtttgtgactgactttttttaatgactgtttttagtcaagaaaatgtgagggtaggtctgccaagagctactgaaaagagttacattttctaaaaaaaaaaaaatcctcgtcttttctttttgagaataatttgtggtgtttctgaaatcattgtctgcccataaagagagattacttaaacaaaaagtctgtataaaatatgactacaaataaagatgagaaaaaaatcatattcttgattaatttattgatctattaaattaatagtcttggaagtagatccctctttggacttccagttagagacagggccttactctatggcccaggctggagtgtagtagtgccaccatagctcattgtgtagctcaccgcaacctcaaactcctggactcaagcaaacctcctgcctcagcctcccaagtggctggaatacagacaggtgccaccatgaccacacctggctatttttttttcaattgtagagctaaggtctccctatgttgcccaggctggttttgaactcctggcctccagtgagcctcccacctcagcctcccaaaatgctgggattccaggcataagccacgagacctggcctatttatagtttaaattttctcatcgtctaaataaaagatctaaaactaattgtctaagttggcggagcagtcagaacacacacatttattgattaaattcattgtcttatatggatgtggttcatggtgcccaaaacaattacaatagtaacatcaaaggtcactggttacagattaccatatcaaatataattataattaaaaagtttgaaatattgtgagatttacctagatatggcacagagatacaaatgaacacatgctattaaaaagtggtgccaataaagttgcttgatgcagggtggtcataaaccttcaatttgtgaaaaacacattatctgtgaagccaagtgaagcaaagcacaatcaattgaagtatgtctatattccactgcctttgtagagtgtatatagttgtattacataacatatataatatatataatatatatatttgggtatatgtaatatatattatatatatttgtatatatattatacatacatattatatacatatatagtatgcatatatattatacatatatattacatatatatatatatttgatatggactgtgtcttgtttccccaaaattaatatattgaagccttaactctcaatgtgttagcatttggaggtgggacctttggaagtaattaggtttagatgagcccataaggatggggtcttcatgatgggattagtgctcttacaggaagagaccagagagctaacactttctattcgctatgtacgtacataggaaaaaggcagccctttgaaagcccagaagatgaccctcctcagacttgccaggttcaagaactataagaaataaatgtctattgttcagaccagcgcctatcttatttttatatagcagcctgagcttactaaaacaattattaagaaaaaacagcaaagcaaacaaacaaaagcaactatgtttaaaactcctggaaaaataatttatcttctgtgcagctgttttttaagatcttcctttaatgtatttcccctcatttttcttgcgtcttatttggagtctgtagtagcatagttcttaatttgcttatcaagtaatttacatcatattaaacatgaatttcaaccagcaaagaatattattaaaacttctggactaatgttattcacttgtattctttcctactacccggaaatgcttttgctggcaatgatttctcctttgatgttgtgaagtttcgggccattgttagagaaacaggtccacttgccgattagcaggcagtaggctttgtgacctaagttcagtaacagaaaatcattactttctctggcaatttgatacaacatgcttcatatattccaaaattcatcaattttctgctctgttgatgtcctcctttattatgttaaagaattgccacagtatagtttattcataatgctattttcagttgaattactagagctccactttagcattttaaaatcatattatcgcatgtttatttccaaattaacagggcaataaaaatcctctcttaaaaatcagggatatcagtattcatctcttttcatgtaaaaatattaaaaaattagaagtgaaatatcacagaagatattttaaatatgaagacaaataatgaaataaggagaattttaaaagccaaatattttggatcagagtaagaagttagtggtaaaagataaaggttatccaacaaccttttgcaaatgaagccaaaaaagtaggtttgcgcaacactgaataactaaaattacaactcttttatatttcattaaaaaacatgccctttttcaaaaagtcagatcggtttaatcacaccataaaattatttacccaaagttaaggaaaaatagcatgctttcatataagtagaaaatttaaatacacaattgatatttaacgttctctaagcaatgtaaagattgcttttaagccatctaacagagttgtatttattattagggatcaaaaagtgtgtaaattagcacaatatattttatataaaatgaatctgttttctcttataagagtatacaattataattctgaattttgaatttattcttaaacaaataaaaacaactgctatatctgaattcttgttttatgtcactctatctatctatatttttttactatctatattttttttactatctatatttttttactatctatattttaggcatttttactatctatattttaggcattttataggctaagtatgcgcagttggtgcttactcaatatagcctagcaatgctccctgtttcttttttttaacctttaatttcaggggtacatgtgcaggtttgttatataaatacatttgcatcatgggggtttgttttacagattaattcattacccaggcattaagcctatgactcattagttatttttccagatcgtctccctcccccgaccttctgccctcttgtagggcccagtgtctgttgttcccttctttgtgtgcatgtgttctcatcatttagcttgcacttacaagtgagagaatgtggcatttgttttttcgttcctacattgatttgctaaggataatggccttcaattccatccatattccttcaaaacacatgatctcgttcctttttatggctacatcttattccctggtgtatatgttcaacattttatttatccagtctttactattgatggccatttaggtctattccatgtctttgttaatgtgaatagtgctgcagtgaacatatgtgtgcgtgtgtctttataatagaacaatttatattcctttggatatatacccagtaatgggattgctgggtctaatggtagttctgtttttaggtctttgaagaatcaccacactgttttccacaatggctgaattaatttacattctctttaacagtgtatagtgttcctttttctctgcaaccttaccagcacctgctattttttgactttttaataatagccattctgactggtgtgcttactggttcttaatctcacccacatcttagaataatgtggaacattcaaactacccacacctgtttctaaaaactgaagttctgttttaattggactttagtagagccaagaaatgagtattacttaaaatcttgccatgtgattctactaggaagccagagttcagagccatggattacatttttaatataaatacacattattagttgaagcagttttaagttaggatagctgtaacgttgattgaaaggggaatacttaaaacagaaccctgccttgggtcgtcaagacttaaaaaattcttctgtttttattctattaaatataatcatgcattcatttactttagcatttgtaattctaaaacacattgcaaatttcacaaaactatcattttctaaatgtcaacactctaaatacaccatttattttttaaagtagtatattcacttcaaattccattgctgtgtcaagagttagttgaacttaaaatataattaatagttactcagcaaaaatagaaagatgttagctgactgtgtcaaaagaaatattttaacactgatttcatttttactaaatgactgaatttttctttatgttttatgcttaagcttctctgctttctttctattttttgtggtttaaataaagaaccatgattatttgtataactgattgctcaaagtaattaatcatttttcttatgaaattaccagggtaaattaagaatcttataattacagagttttctcttgcctagaggaaacatactgagaaactgtgttaggaaattattatttcaaaacccagtctaagttcttagccactggacatttaaaaaatacatattacatatactttttctaacatgattgagaatatagtttgtttcagatttccacatttcttaaatgaaaacaataaagaattcaaaaggcaaaaggtactgtaaaaaaagttatttgatcacatgtaaatgaaaattctaccttcttattgaattttactaattagaggggtaattattctcacatcagattatttgcacaagatactatttctgatgtattttattaaagaactcaaaaggcaaaggtattgtaaaaaaagttatttgatcacatgtaaatgaaaattctaccttcttattgaattttactaattagaggggtaattattctggcatcagattatttgcacaagatactatttctgatctattttattaaaagtcaccatttattattggttttcatctcatgttatatatgcaaatgaaactcctttgagtatgcaatggttatttactgcagtgaatattgtacaatcatatttatcaaaatgttcttcttcaaaatatttttctaatgcttattagcaagcagtttttatatttgagaaagtgaaacatggactttagaatcagatttaggccatatggtaagccagctgcctgaaaaatcttcataacaaatgctaatattgatgaattttggagatgtcattatatatgtatacctaaaactacaggaaaacaaagaaaattaccaatgccagaaacacaggcaacacttaaaaccagcaagaccagttgctctgacttttctggatggaaagagagatggacccagcaatttataaatttggattttcttaaggctcatcagcgaaggggtgatgcatagctggacctagattgaaagagtaaagaaaaatacttattaaccaacccagtacaattaagaagtttgtctgtaaatactagaacaattggtagaaaaaacaaatacatattctcccctgagaatctgtaacatcaggattatccatcatgtgttgtttgacttcaaacttataaattatacagccttgagccatgaagcatcaaattaacaaattaacatatagattattttctggccattgatacactggaagtttggtggaagagatgcaaaatcattccagagcaaaagctgaaaatttttttctgcaaagggcaagataataaacatcttacacattattgaccattttaaagagcagcttatagtcaccaaaaggaatatcaacaaactagcaagtgaagataaagaattatccagaatgcagaatatgaaccaaaagatagaacataagataagctgaaagacatggaggattgaataaaactatccaaggaatatctaaaagaaattctgaaaagagaatagtaggaataaaaataatgagattataatagtttgcttctacttctgggatgaatgtagtagttgtataagacacatactcttattaaaatgacaagaaaaagctggataaattataaaagccacatatcttttaaagcatgagggaactgtagaagcaatgatgaatagatgaactaagagtacagacatacctgagtgttcgaaatgggccaaagagcatgatgcattcatagcatctactagtcaattctggcacaaattaggaagtagaaggcatgttcaatggaggcaaaacagtaatatatatataaacatgtgggtaagtctaaagaagcatttgctatattgaatcaaacaaatacaataaagtaaaacaaatactagagaacattgttaaactgagttaagtttggctcaaagtgcccattgtacttgcctaattaagtttggcccaaagtggcatccatacatagtgactgtactctaacttaatgtgtaaataagttgtaagctaatgtagatgtatggacttgtaaccaagcaactgagactcaaccaatcataggagccaaacccttagtcaatcccaaactgaatgctgccaaattatgcccaaataaggcaaatattgaactgcaccaatcagggaaactctgaatataattttctatgttctggttataaatacatctcaccactctggatgtggagtcactctgaacaatcttcgttctgggatggtgcctagttctcaaacctttttcttggtcaaataaacttagtgaaatttaacatgtcttagttgtatttttttaaacaacattcaaagacctacgaaataggacagggaacttgtatttagactatactgtctaaatgcaacttatttatgctagttatttgtgtgttatagagaatatagtgatattgatatactttaagtcatttatgtacatcgggaagaggaaaaaaaaaagttacccaattcaatggaagtcaaatgaagaagcagaatagagctaccagaaaaacatgataagagttaaagaagatgggagctcaaagaggaaaactatcactgaatttggggaacttctccttgcaagccaagttaacttttgttcagatagaattctcagatgaaaaaagacagaaattatagtctatggctgacaaaatatagagagtctgcccagagacttttgctattctaagctagaatcttaaggttaatacacttcaatgaaggagaaaacaagaaccaactcttgagcatacttgaagtctgggaccaaatctgagttgttcagatactcatattttcaccctgatttaagatgatctgatatgggtaatgcttgcataatcaaaacttctggaggaacttatctccatagtagacaacaaggtaatcttaaactatcctgacactaattgggtgtataaacttggccaagtcatttttccctttgagtctcagtttcgtcaactgtaacgtgaatatgaaagtaactaacttgtaggtctgtattaaaaattaagtcaattattttggtaaatcagttgtatgcaatatagcgtacatgagagagagagagagagtttgtgtgcatgtgtttagagagagatggagagagagacacacatacacagagaagaatcagtatattgttaaggataacaacatctagaaacaaatcgacagacaagaaaaacaatttaagtaatagaattttcagacagaagttaaagaacaaaacatatgcttaaagatgcccacaggaaaatacaaatatgatcatggtagatttagaaaggaaatacctgctagaagtaacagagaactacaggaaaattaatgaagtgcagtaggaagaaagaaaataaattattgaagaaaagtttcaagatacaaaggatagaattaaacattaatatatgtctaaactttaccaggaaaagagagacaaaggcaataactaaggaaataatagagaatgtttttagtactgattgaagacagataagcagatttaagcaggtcaacaaattctgagtggagtaagaaaagtacagtgaagaaaacaaaagacaaagccaaaattctgtaaagcaacctgaaaataaggcttattaccattaaataacaacatttcagtctatagaaacttacatcctaggagagggaatactttaaataaaaaagtaatggatgaaaggagaaaaattccatcaagtgggataactgtgatccataaagaagtagcaggtgagatggggagtaaaaaaacaaacatatataaatcctcttattttatatattagagctcaattttattcccatctttgataatccaaaaattatacactgatcaatatatctgttctaaatgttaagattccaacaggtagatcatgtctctcaaaatgtgttgcacattgcctcaactggaggttcatgatgcatattaaaataagaaaggcttagagaattcttacagcaaggaaaacaatgtaagtttatttaatttagtgttttagctacatatttaataattattttaggtaggcagttgtttaaagacaatagaaaatacttggaatttaaagcaagcaaaaatgaatgtgttggaaaagcacaacgcagctcttagaattgaaaaaaaagtaggtgaaccaggctcaggcaggaatcagagagcaagtcagaaccaatatcagaaaaaggaagttctgcttttcatgtggctattgtcctgtcagtcatgaccgctggccactgccagcaaagcatgcacaggcattttctggaatgctgctgggctctgctttagcttgtcacttcccactttaccattggattccaaaaatctatccatccgacaggaataatttcagactctctgcctacttcttaccttgcaaggttaaaaatgcaaggaatgagtggctattcttgggtctctggtttacattttagcctccaggtggtgggaagagaaaaatctactcacaaacagcttcaaaacggaaaggccctatattggcattcctacataaaagaaagtactggggggcttgacaaatggacatttgccttcaaagaacacatattctcctttagacaaagtttgcacttatatagcacaattaacctacttcttatcaatcaataaaatgaagagacaattacagaacaggataaggtgtttgcaaactatgtattcaacaaggtttaatatccagaatatataaggaactcaaaaaactcaatagcaaaagaaaaagttgattaaaaaatggacaaaagaagacatacaaatggccaaaaaatatataaagaaatgctcaacatcattaagcctcagaaaaatgcaaaacaaacccacaatgagctattaccttaccccagtttaaatgatgaatattatcaagaagacaaaatataacaaatggaaacgataatgtggagaaagaggaaagttatacactgttgatgggaatataaaatagtatagctgttatgaaaagcagtatggagtttccacaaaaaataaaaaagagaactattatattacccagcaatcccactactgcgtacgtaataaaaaaaaaaatgaaattagtatgacaaagagacatctgcacccagggatattgaagcatcattcaaaatagccgtgatatggaatctgcctaaatactcatctaacaacaaatggataaagaaaaagtggtgtataaatgtatatctatctatctatctatctatctatctatctatctatctatttatcatctatctatttatcatctatctatccacccctccagaacaatattcagccataaaatgctgttatttttagcaatgtggatgaagttggaggacattttgttaagtgaaataagccaggcacagaaagacgcactgcatgatcaaattcatatctggagttttaaggatatggagaaagatgttaggttttttccttgtgtggacaatatttaaaattattatatttggagagataactagaatactcctgccaacttaactatgacccattgaattgctctgaattataaatcagatactctgaattagcacttcactaccatttttaaatctacagcatttatgtaaattaataactgctgtagagcatactactcatggctgaaaaaagtgacctgatgattcgagctatctaagactcacctgatgtctaacagcactaaggatcaagctatcacctctcccttaacacatctttcacaccagtgtgctagagcagatagctgaaaagttttccctaagccagagatcattctgacaaggcatatggaacaatagagatgtcaacatgctttcaagacaagtaacagtaatcctggctcttaacttgctttaataataatgaattcttttatcaagtcctgaggaatgagggcttccaggtgccatatttccaggtgcttatcagaatttttctttgctgataagaacaattgttgcagcatgctttgctattcatatacagaaagacaagaaatttatattctaataatagaacacaagtccatctcttgcatctgatttagccagattaagtcacctttccaccaatatcaatctggaagtgatatcatgaactaaatggtgtcaacctggggtttctattatatctcgacaaagaaaaagaagttgccatcattggcaaggcacatacaggatacatctctgtttcgggagatgggatgagatttccctgattctcctacactgcagagggtagagggaggtatttatataatacacgggattttaattgaagaagcaaagaggaatggattattgggattaatagtgtttatccaatacaagatgaaaaacaacatattattgtttgtattgtgatggttctagaataaaacacatcatttctctaattttggttagatctttgctgaaagaaaaagataaataaaatatcctacagtttatccatatccatgttcctctacactaaatattcatctttgattagttatttttaactatatttgatttctttataaattaccttttgaaactttaaacacataaagacattgtttcccctcaaaggatttttcttttgctttcttttgttttttttttatctaaaactttctttcaaaaacaatgactttcataaacttgcaacttgttaaatatagtatttttattaacattctagtttgtaacacaaggcaaaacctaaacacttaccatttataaataatgggtaatactgtttcaacttaaccttgagaatgtagaaaaaaaattgagtccagtctgatagcagccaaaagatctcagaaacagtaatcttagtgctagcctggcagacacaatctgcacagaacttaatcaaaataagattaaaagtccatagcaatttccttgagtggccagtcagatatcccccactacagtcaccaaccagcctgcccctggggcctatttcagaaataaattggtttgtagatgagctgatgcagaagaaggaaaaaaaaatgttttcttgagactgtacctaaatcttatcaagtaatacaaggaagcttcaaagtctttttattctgaaatgttattttattctgctttatatcatcttaaatttattagtattatattaaatattagtttatgtaagcttattatttgactctgtataggatataatagatggcattgaatatttaataagatagcaacagcaataacacctgagaaattgttcagggaaggattctattcagttattaaaagatttgcatacttatttcactaatattactcagcaatcacaaacattgggtaatgctagacaaatctgcaagaggtactgttattccagcaccttaaaaacatttttcaatctgaaagatacttctagatgtttttttccataacagagcagatgatttctaagtgtttatatcactgaaacttcacagtattagtggaatatgttatcctttataccaaaagtaatcagattattttataaagcaattatcaattaaatatagattactaagaacatactgtataaaatgccgtatgggctattaattctgcatgcattgccacatttgattatctcaaaaaacctcctgaaatatgtattcttaacacacttttattgagattatgagtaataaaagttaaaagattttcccaaagacgtacaagtaaaacaggtcctcaaataaagttgttttgttcaatgatgtttcgctataatgtagatgagaataaatattgattcctggacagggctaccatctgtgtagggtctgcatgttctccccacgcctgcatgggttttctccaggaactcctgcttcctctcacatccccaagatgtgcatgtctggttaattggcatttccccactgtgtgtccccatgtgagtgaatgtggttgtgccctgccatggaatagcatcctgtgcagggtttattcctgcattacatgctgagtaagaataggctcttgccacccgagactctgaactggaataattgggtaaataatcatcttacttgtttttattaatctttttaaaaatgtatgtatacctcacacttatttcagtgttgaatgttttaagtgttttagtcttcatttagaagtacagtgataatattgtgaccagaaatatgcagtaggaacttatatattgttttatcaattggcctatggtaaaatttgtttcattgttcaccattttgctgatagttgcagtttccaataatctactgatattaaatgtggacttactatgtaaacaatagcaaggatcctaaatcctaggttacatctaagtttaaatggcttgacaccatgtcagaattgccttatcaccatgctcttataagtgtttcattttttaaaacagtgcaaactgaattttgcatgagtattatcattaaaaatttttttgttacagataggatcttgctatgttgcccaggttgaccttgaagttctgagttcaaatgatccttttgcctcagcatccagtgtacctgggactacaactgtgtgccaccatacccagggctgcaggaaaagttgttacgtaaagcagtgatttatgaaaataagactttatttgggcaacatagaaaatgtaaacaaaaagagttgctcaacataaaacttactcaagtcacaatttacctctgacatgacatatttccatccacttcagaaaaaaaatgtgtatacctttttatttctttttttcttttctttccgtttttttttttttttttttttttttttagacgggctggagtgcagtcacagctcactgcacctttgagctcctgggctaaagtaatcttcctttctcagcctcttgagtagttagaactaagacatgcaccaccatgtctggctaatttttaacattttttttgtggagatggagtctcgctatgttgcccaggctggtcttgaacttctggccacatgctatcctctcacctcgaccccccaaagcacttggattattggctcaagtacttagatgtattaaccaggatcacagagagcttgattttgtaagtttgagttagcatgtaataactgcagttgattttgatgcatgtatttaatgagaatcattgctttagactatatgatatttgaaacaaaagagcaataggactgcacggcacaatataaagtctgttatgacatagtgactttaatatattctaattaaaattataatagtaaaagctaaaaatgacaagacaattgttagaaatcatatcacgacagcataatcatgtatccagaagtgattgatacaataacatgaactgacattttgctacaatattaatcagttaatacaggttttgaggtttcagttaactggttaatcataaaatattatataaaatattatcaaattgttgtgtaagtcatctcactgtattctaaaatttatgttattttatatttctaatctgtgttttgcagagatcatgaaaattttaactgggtaactgaagaagaattgtcccaaggacttgaataaatgttaatgttcataacagtatgttctaaaaagaaatttaagtaaaaaaggaaaaaacatatttcattttaaaaatatctacccatgcacatcattcatctaaaaaacccatttactataatcatctagttatgtaaagatatacccaatagctacttaaaatagaaatattctatttcattattagaaattattattttaaaaggttgttaaaacatcaaaaatatgcttatttctagtaaccagagaacacagcagggttatgaaacttcggattcctgtttggtttggcaggtaactagattaacaaaaatacgaggttttgagtttcaaaacacaatagcatatttaaaaaatacttggtgggagtctggcaattgagagaccttagaagcataatcattggtcttcacaatcactgccaggtactctttcaaactagcttgaataactgcaaaacacatcatcaacccagcttttttttgctggacctgggcatatataaactgattagatttaaaaataaaaaaattagagttttttctgttgtgtttgaagaggtgaacccttggactcaaaatctctcaaaagtcctgtctttcacttcagaatctgcgttaatttgcacaggaatatacttctgtgttttaataaacacatgtaatttttctgttttcatcttgcaagtaatgacagctttgttctcaaaccaattttgttttttatagattttaccctgatatataatgaagagacaattacatgatctgtgtagaaattcttcctctaaactaaattatactaccttagaaatctgacatgaaagtaccaaaactatgtaaattcatttcaccaagaaaattattacataaaacagtgattcatggaaataagacttgatttgggcaacatagaaagtattaaaactaaaaaggagttgcttgagataaaatttacccaagtgacaattttacctgtgacaaacatatttccatccactgcagtaacaaatgtgtttagtttattaaagtatatgtttaacagcaaaaaataaatagaataaatttattatccctatccagtgataaacacaattttaaaataaaaataaaaacatcctgcttatatttgctatactatttcatgcattaggctaagatatatggttatttccatgctttcaggatgtgtttaacaaatctcttatacattttcctattgttgtcattttaatatcttgaatataatattaaataaacatttctacaaataatttgaacctcaaagtttcataagcatctatccttcaatatttaggcctaaaaagtaatctccattatctatcaaattctaaatttgaacttattatggtttactcctactttttaattattactttggttaaagatacttcatgatattattaagttccttactaataatgtatatggttgtattacattcatttatccatcaagactaactttgagctactatgaaatataattcaaatcattcatataatatctaatgaatgattattataatacaaagcactatactaggtttcataagtgatacaaaaacaagtgcaaccgcctcagtaaccaacacatttgcagtctaatagaggaaaacaagccctgttataagaataattatagtaaaagactatataaaatacaatccattttgacacacacaccttcaactctatttgctaattctaattttcactcttcagtttatttttagattaaatagttattttcacaaatcagtctgaggacagagttttttgctttgttttgttttgttttgttttgtttttgtgagtcatcagcactatgcaattgcatatacctgtcgtgtttggtctacagaggctaaacatcatgtaatagtttttatgcattttgttcataggttactgggtgctttaaggcaaaactgaatgagtttccaatagtccaaaactacaagaaatacagacacaaagtgcctggggttatcctcaaatgaagttagatttgaattgcattcaataaccttttttacaatgtgtagatgctcaaagcaaatacaatagtttctctttgcctctgtgacttgagttcatagtgttgtgtttaaatataacttttgtaatgtctacttcactgaagaaacttttaaaaaaatttgacttataatggttttctgtaacaacctatggtgcttggtttgtaaagtaaaacaggaactcaatttagtacctactgaataataacattttttaactgagattccactcataaagcacctaaatgtttaaagttaaagcatattatgttgatattaaatttaaaaagaacaagttagagaagaaataaagaaaaaaaacttcggagaataaactgcttccaagtatacaagcactaaacaggctatacactggtatgctcattataaataaaaacattcattcatgtcattttatctcattactacatatttaaaataatctcttatcattatagtaggccatcattttccaaatagcatcaagaatccttattttgaaatagtaatcagatcatgtagttctcctgatcagatctcttcacactctagaataatatgcataccttcattttagcttttagacttttttctgatctagctctagattattgtttgatctcatttttactattcttctcattgctcattcaattcaatttcaagcataatgattttttgctctttttggaatacactagctttttgatttcattagagcctgtacacttccctcttcctgaaatgttcttccccaaatttatgtatagcttattctctctttgttcagggctcagtgtaattgtagattgttctctaccttgaatatgtcttacccctcatttgactggttttccttcataccaattatttgtattctaaaatattttatatttttccattgacttgttcactgagttccttcctctaaaatgtagcttcatgagggcagatattttgttaaaattgtatgctactgtatcactagaactgagaacaatgcctgaacagagtagctactcatgactcattggctaaaacaagttaatgaatgagaacaggcaggtagaaagccaggaaggaaaggaggctattatattaagttgaatgagggattaaatgaatataaatcagctgaaagtagcataggttatgcaatatgcttaataaagtatgtttgtctattttcgttatgtaatccaaaacctggccaaccacaaaactggctttttactcactttctctttcttccctgtttagtgcagcataaaattagttattgattttatctcttaacgctccgcctctattagtgaaaggatcttctcttatcatatttccagtccaaagttcagtggaaactttttacactcttacagtctatttgaaatccttatatcataaacataccagcacttatcacagcactattcacagtagcaaagatactgaatcaacctaagtgtccaccaatagatgatttgataaagaaaatgtgagatggtaccatctcactccagttagaatggagatcactaaaaagtcagaaaacaacagatactggagagaatgtggagcaataggcatgcttttacactgttggtgggagtgtaaattagtttaaccattgtggaagacagtgtggcgattcttcagggatctagaactagaaatacattttgacccagcaatcccattactgggtatatacccaaaggattataaatcatcctactctgaagacacatgcacacatatgtttatcgcagcactgttcacaatagcaaagacttggaaccaacccaaatgcccaccaatgatagactggataaagaaaatgtggcacatatacatcatggaatactatgcagccataaaaaatgatgagttcatgtcctttgcagggacatgaatgaaattggcaaacatcattctcagcaagctaacacaagaacagaaaaccaaacactgcatgctctcactcataagtgggagttgaacaatgagaatacatggacacaaggaggggaacatcacactccacagcctgtcagagggtgaggggctaggggagggatagcatttagagaaagacttaatgtagatgacaggttgatgagtgcagcaaaccactatggcacgtgtatacctacataacaaacctgcaagttctgcacatgtaccccagaacttaaagtataataaaaaagatttccacctaaagataagaaaatatgatgatatacacaatggaatacaattcagcctttaaaaataatatacttatgaaacatgtattttggagcagtttggatggaactggaggacattatcttagatgaaagtcagacacagaaagacagatactgcgtgttctcatttataaatgggaggtaattaatatgttcacatggacatagagtgtgcaatgatagagacttggacatgaagacttggaagagttgggggagagtgagaggggagtaaatgataagaaattacttaatgagtacaaggtatgcttttcaggtgatgaatatgctgaacatcctgacttcactatgcaacatatggatgtaacaaaattacagttgcactccataaatttatagaaataaaataaaataaattacattttaatagagacactatcagagaaatacaccaaaatgactggactgaactggaaatggaaaaggtagaaatctcattttctcttcagagactattgcaaatttgtatgtatgtaatacactaatcacatcagatgccagttttaagtacatattttcctccactgtgtagatttgtttcaataaggaaacatttcagaacatacataatcaatacaaagccattctcagtaatttattttcattccatgccatgttacttaggtttacatttactaccttagaaaacattatgtacaaaaacttttctttcttatagtgaattaaatctccaactgcttttgtttctattttaagaaagtaaatattatgacataaatgtttgcaatgtttttgtttaaataaagtatttctagatttctcttaattcatagttacgttggtttctttattgatgttcaaacacagacttttaaaaattcatatttttttaaaatgtgtgactatttactttctagttcaatttaaaaagcatttaccataaaaatggcagtatctttttgtacagatgctacctctgaatcaaagcctttcagcaactggcaacaggaagctctaatgcactttatccctaatagttataaaatatgcaatcatctgaaatcacatattgatttcatattgatttccacttcttttctaactacggttatacgtaaatatttcactttcaaaaatagatctttgcctttttatttagtttttttttccttggcttagaaatagtttttatgaaatattcaaatataaaaatagtctgtaaaagcaaagtatggttctttttcagccaaaacactttcccctaagcatttcattagttatataagtgataaatgtttttctgaatgggaatttacctaaagtgtttcaaaattaggtgaccatttgtgctttccaaaccatacagaactttatatttattcctgggtaaatcacccatttccttgttcatcaagatcaggtgaaatgatatccatatgagataattaattcctctgctatctattttattatacttagttatccattgaaaataaatatctactataacaagtaaaatatataatagtgtagaagacaacaagagtatgtgtttgcagtatgtgtaatagagttaaatatatctaaatatagtatgtctgtattaaggcaatgaacatcaattttagctaatcaccctcattaaagcaaagggcactaccatatgtgacatagttatcattgacagtctgataaatcttgtagctgaggtaacggacagggaagagtttgtgatagtgaaatttgtagaactaagatcaaattaccaaatacgtaggcattattaaacaaattctcaccaattacttcaaaaatattgtaacttctatttaatatttcttgtttttaatcttaaaaactctaaattgagtagaatttgaaatagcagtaaatttcaggttaatggaaataaaatcacacttgttattattgttcaattttttttattaagtctgaagaaatatttaattgaatatgacatctaagaatgatggacaaaagctttttttctttccactcctttttctgaaagctttgatacaaaaatcatttgacacaaatgatttttttgtgtgtgacaggatcttactatgttgcccaggctgaagtgcagtgtgctcatgcaatcctcccatctcagcctcctgagtagctgggactacaggcacatgccgccatgcccagctaatttttgtatctttagtagaaacaagattttgccacattgcccaggctggtctccaactcgtgggctgaagtgatctgcccaccttggcctcccagtgttctgggattacaggagtgagccactgtacccggctgatgcaaatgatttctattattaatatcttgcagttattcttccatcagataaccatcaatgtcaaaataaagattattaattactgaaggactgaaaaatcaaaaatcaacttcatgagatgctttacaaacaagtgatctcttttaatatttgactcagtaaaattttttaagaaaagttaagtttgtgtttttatttgtgtatactctctagtgcttaaatgtatcaggatagaacttttctaaactaggtcagtcttttttctatatctatggttgaatacttcagttaaataaagcaatggtagatagcaaactatgttataattggcattttgggcacttgctgcaattaattgccaaaaaaagcatatctcaccacaattgatctctcatttttccactctcatttatttcccttcactttcttcttggcttctgcaaaagcatttgtttttcctttttctttcttctttaaaaaaatatatttgaagagatttactctaagccaaatatgagtcaccatggccagtgacacagcattcaggaggtcctgagaacatgtgcccaaggtggttgggaggcagcttgcttttatacattttagagaggcatgagacatcaattaactacacttgagaaatacatcagtttgatccagaaaggtgggacaactcaaagcagagggagtgggggtgggaggggttgggggtggcaggggggttgggggatgggagggtattggggtttgggggttggttccaggctataggtgaatttaaacattttctggttgataattggttgagtttgtttcaagacctgggattgatagaaagggaatgttcaggttaagataaaagattgtggagaccaaggttcttttgaagtcataacagtggctgccgttagagacaataaatgacaagtgtttcctattcagatctttaaaaggtactagacttttagttaatctctttaggactgggagggccgtttttacatattataatttatctccttcatgtctgtaacgaagataggaatcgctataaagtgtcttcccagtttctgcctaaccacatccctggatttcctggcccctggcttggcatatgtttggggttagccttctcccactgctaatttgtatgccataagatggttgttttgttcctcagtacatttatgtcagatataattgttactgtagtaaacaactattgtgtaaaacaatgataagtgagtgtgaaagtaaaaaaacaaatcagaaaatgaagcagaatgtaaataattgataaagacaagttctgaaaaaatgtcaaattggatttaggagtcagacacctgtaagaggtttatttgaggggctaagcgtgctggtatttacacacatattacttcttgtgtctcttcaatttattggttcatttcaaaaaaccaaagctaaaaatcataaaatattcattatgtaaaaaaaagaatgttcaatgaatccatacatacataccgaagacctttgtcagatagttgacaagtatatttgcatatatgttttccaaggtaaaagaaaatttgtggctgggcacggcaactcatgcctgcaatcccagcatttcaggaggccaaggccggtggatcagctgaagtcaggcatccaagaccagcctggccaacacggtgaaaccccatctctactaaaaatacaaaaaaatagctgggcgtggtggctggcacctgtaatcccagctacttgggaggccgaagcaagagaattgcttgaacccgggaggcagagtttgcagtaagctgagatcaagccactgcactacagcctgggcaacaagagtgaaactctgtctcaaaaaaaaaaaaaaaaaaaagaaaaagaaaaagaaaaaagacaatttgtaggatatggataagtaattcattttagaagaatttttttttgtagaatgatttgtgctaaagcaatacatctctttctatcatatactgatatcttgaaaattttataacgtttcttgtcactttcagtattttaaaaataggattgattctaagttttgagtttatggtgcatttgaatattagagatattatctcatacatttcaaagttttgctgcattctaaactcagtcctgccttagccttagtaatggcaatgaagtgcggggatagaatgttcactatttttttatgtgctgttaaaatttcatacctcctgttctatcttgaagtcttacagttttggaatggtgagtgggggaaacaagcataaaactattacataattcatgtagttttcactgggcaacagtatctatcctctgaatggtgaaatggctacttttcatttatttatttttttctttcctggggtaaaacgcttgaaaactgcaccactgggaaattgcagctatagtccatgtttcaacatagtccatgcttctttgagttggccacttaatgtttactctcatctccttaggtttagcagtaaagaccagtaagatttcttctgttaggatcatctagccattccaaacatttctcttagatttgattctttcaagacaaatcaacccaataaaaagctcataaataacggtgatctagctaccacatttgatgttctcatctgaccaaaccaaattttatgtatacattcaattctcaatccaacctagtctgtttgcctaaaccattccagacaaacttccacttcgaaggttttaaatgcataagtcagatagcaatccttcagttgccccagaggcacatcacgttctttgaatgcttcattatagtcctcttcatttagcaatcagtgaggcaatacactggcatcatgatccctttttttaggaactctgtacaaaattccctttgaaaatataaattttggaaatgagtgatgagcaaaggggtttcattaacattatcacaatctcttgatatatctgcttgataatgtagcacctattatttggggccattaggaccttggctgaaattctggtaaatgtaaagaaaccacatttaacatccagttaatttaatttttgtttgtttgtttgttttgtttttgtttttgtttttgagacgttgtcttactatgtcacccaggctagagtgcagtggtgtgatctcgactcactgcaacctccacctccaccttctgggttcaagcaattatcttcctcagcctgggattacaggaacccaccaccatgcccacctaattttgtatttttagtaaagacggggtttcactatcttggtcaggctagtcttgaaggcctgacctcgtgatccacctgcctcgacctcccaaagtgctggaattacaggcatgagccaccttgcctggcctcaatattgtttttaataatttctgctttacttgcagttaatcctatcaggccttctaccatacccagttgtgtcagcaagatctgtacaatgataagtaacacatggctcccagggctaaacatattcctaacacttatataaacactttttcagaaatttgacaatattttataattaaacaatatcttattttacaagaaaagatatggtatcacaatactctgagcaaagagttaatttgcttctcaaatttcctagataatgaagtagtcctaaaatatttaactcagtattggtaatagtttcaatttgaggaagtgttctgaatagcctttttaatgctgatgtcataagattgtgttacaaacacactttcatttaaagacactttatttttaattttgttctaaaaactaaaattatatataaatacacatgcatcctaaactatatatgtataatatacatatatgtatatatatacacacagagagagagagagagagaaggagagagaaacagagacaaagagagccataaatcctgaatttgttgttgtcagtggtgtttgatagcatcactttttaactcaataggatgtatctgcacaaagctaaaattaatttatttttgccatacaaggcaagtgtatcttgttgatgtctatagagaaaataaatcaccctctaaagaacggtttataaataaataattgatatctgaaaattcagaaaaaaataccactatcattttacttaccatattgcattgaaattatatgtttatgcttctcttgcttctacctctctgtgaattcaaggttagaaaaggagaaatttttatcttagcattcccaggaccaatcacaatatctaatacttacagcatgcaataaatgttggttgaactaaaataaatctgatataaaaacaaataatgctttagggaagtgatttttcatttgagattattttctcagaaaaattaacatgaccaggttgtcatcctatgcaaacattagtatgccttattgatttttcactaagttatatagcttatattataagacttttttatgggtgtctctacctatagattccaggcactaacaaacgtgtagaaactcataaatttaatgcattttatcaagttgattaatatagcatgaacatttttcaactggcttcacaaatcatttattgttaaatgttattcttatacctgtattagagagaaaaaagccagaggtggcaaggtgatatacagatcaactggaaatccacaagttttggtttggaactctttggaaaattgaataaagagtcacaccttgctcaaaactgaatcagtaaaagtgatgtacatatcaataaacaaactaataaaaaagcattaaaaatatagtcagcatatatttttctggaatataaaattgaggaactagaataattcaacttgaataagtgtaactaattcattttctgcaaaatattacccagagattgagtatttttctatttattctattggaaaaaaatgatataccactgtactggaaatattcagaaaagtttgtctattttttaaaattgtacttattatacctttataaccgtgagataatatatttattatttgaatgagaataaatgtttatgatttatacaaacatgcctgacacagactactatgcccacaaaagttgaatggttgtttttagcttatatatacctatacgggttaatagatatatctttacttcttttttctttttttttgagacagagtctcactctgcagcccaggttggagtgcagtgacatgatctcggctcactgcaactccgcctcccatgttcacgctatcctcctacctcagcctcctgaatagctgggactacaggtgcccgccaccacgcccgtcttattttttgtatttttagtagcgatggggtttcaccgtgttagccaggatggtctcaatctcctgacattgtgatctgcctgcctcagcctcccaaagtgctgggattataggcgcgagccaccgcacccggccaatatatctttacttcttataagaaatgagtaactttattaattctaccaacagataacattcttcctctcagagagtaatatgcaatcatttcctaaccttattttattgcgctatattttaaatataataaacgtgtcaaaaatgtggtttcgtactttttataaattgatatatttacctaattacactaaatctagaaaatactattgtgcttattcaaacttctcttctcttcttcagaggcaaacctgtataacttctttggtttgtttgttttaagacgtagtcttactctgttacccaggctagagtgcagtggtacaatgtgaggtcactgcaacctccgcctcccgggttcaagcgattctccggcttcagcatcccaaataactcggattaaacccttataatttctatcatgattgattaattttgttcatcttcaaattccaataattagaattcctacaggatgtgtgtgtgagtgtgtatctggtttattttctttagcataaataaatatttgagatttagccaaatatttgtgtgtatcatttgtttatttttcctcatatttctgagttgcctatgtatttgtcagagtttgcttattcattagtctgttagtgaatattcagattgctttcagaattagcttttacaaataaaggacttaggtgcattctcaaacaggtttttgtgtaaatatatgcttttatttttgttggataaatttctagaattgaaattgctgtgctatagggtagatatatgttggccttatttagaagcgaattatttttcaaagcggttgttccgcttttttttttttttttttttttttttttttttttttgagacagtctcgcgctgtcgcccgggctggagtgcactggcgtgatctgggctcaccgcaagctccacttctcaggttcacgccattctcctgcctcagcttcctgattagttgggactacaggcgcccgccaccacacccgtctaatttttttttttttttgtatttttagtagagacggggtttcaccatgttagccaggataggctcgatctcatgaccccgtgatccacccgcctcggccccccaaagtgctgtgattacaggcatgagccaccgcgcccagccggttgttctattttacactctcacaagaaatagacatgacttctagtttccccacatatttgccaatattagtattatcattttaaatggtagtctttccagtttcaatgcattttggttgcatttccccttatctaataatattgagcatcttttcacattcctataagccacttgtatctcttgttttgtgaaatacctgttcaagattcttataactatttagtggatctcaggagtactctgtgcgttttgaacacgcaatttttttctcatacatatatggaataatttatcacagtctatggcttaaaattatattttcttacattttgcagttttattaggatacatttttaattaatatctacaatttatcaatttttaatcttatgatagtgctttctctgttcagaaatatttttcctattataatagctcacagatattgtttaatttttttcttttaaaagctttctgaattttgctttttcatttttatgcctacattaaaaatatcggattagttttgtgtatacaaaggactgatgcatgtatttttttaatatgagaatgcatttatttcaaaagcctttgttaaagacttactttccccactgaattatctacatgcccttataaacatttaatttactgcataggtggaggtctaattttgaacccatctttatccttattatttttgtgttatgatgctttgatactgcagctttcttagatgtctgaaaattggctctatttttttctcaaaattctaggtcctatgaattttctaaacaaattttggaaacagcttgtgaatttctctcaaaatgtttgccacaatttactatagagttgtagtaaatagatatagaattcattgtagtcaataaattacaaactatagattgcattgatgcttttttttttttttgagacagaatctcaccttgtcacccaggttggagtgcagtggcacaatctcggctcactgcaacctcagcctcccagattcaagcaattatcctgcctcagcctcctgagtagctgggaatacaggcccgtgccaccatgcctggctaatttttttgtatttttttttagtagagacagggttttatcatgttagccagtatagtcttgatgtcctgaccttgtgatccacccaccttggcctcccaaagtgctgggattacaggcatgagcaaccgcgcccagcccctactgcattgattctaaagattaacttccagagaattcacatcaaacaatgttgcatcttcaaatctatgaatatggtagttctttacatttatttaggtcttctgtaatgtttctctacaagaaattttaaaaagttttagagtgaaagatttttaaaggtttcacttaaattattcttaactatttttataccattaaaattttacttttaaatgtattctcaattgtttatttctagtatttagaaattccattaattttacatattgtattttatgtattgaccttgcattctacacattctgcaccattattgaatttgattcttattattcacagctttttaaataaatgtattaggattttcttcatacacaatatacatacataagttctgtgaataaaaatattttttcttttcacttttcaatttttatgcttttcatttcttgaccccatgcaaatctgaaatccagaggggcagccaaatcttaaagctccaaaatgatctcctttgactccatgtctcacatcctgatcatgcagatgcaagaggtgggttcccatggtattgggcagctctgcccctgtggctttgcgggatatagcctgccttctggctgcttttgtgggctggtgttgagtgtctgtggctttcccaggcacatggtgttgttggtggatctaacattctgaggtctggaggatggtggccctcttcccacaggtccaccaggcggtggtgccccagtagggactctgtgtgggggctcccacccaacatttcccttcctcactgccctagcagaggttgtcaatgagggccccatccctgcagcaaacttttgcatgggcatccaggtgtttccatatatcttctgaaatctaagcagatgttcccaaacctcaattcttgatttctgtgcatccacaggctcaacaccacatggaagctgccaaggcttggggcttccaccctatgaagcaacagctcaagctgtactttggtcccttttagtcacagctggagtggctgggatgcagggcaccaacaccctacactgcacacagcatggggaccctgggcccagcaaaaccattttcctctaggcctctgagactgtgatgggaagggctgctgtgaagacttctaacatgcccaggagacattttcaccattgtcttggggattgacattcagttccttgttacttatgcaaatttctgcagccagcttaaatttctcctcagaaaatgggtttttctcttctatcacattgtcaggctgcaaattttctgaacttttatgctctgcttgccttataaactgaaactgaatgcctttaaaagcacccaagtcacttcttcaatgctttgctgtttagaaatttcttctgtcagataccctaattcatctgtcaagttctaagtttcactaatctttagggcatgggcaaaatgctgtcagtctctttgctaaaacataacaagagtcaactttgctctagtttctaacaagttcctcaactccatctgagaccacatcagcctggatctcattgttcacatcattatcagcgttttggtcaaagccattcaaaacgtctctaggaagttccaaactttcctgcattttcctgtcttctgctgagcccttcaaactgttccaacccccgcctgttacgcagttccaaaattgcttccacattttcaggtatcttttcagcagcatcccactctactgataccagtttactgtattagtctgttttaatgctgctgataaagacatacccaagactgggcaattgacaaaagaaaaaaggtttaattggacttacagtttcatgtagctggggaagcctcacaatcatggtggaaagcaaagaggagcaagtcataacttacatggatggcagcaggcaaagagagcttgtgcaggaaaactcccccttataataaccatcagacctcatgagacttactcactatcaggaaaacagcacaggaaaagcctacctccatgattcagttacctcccaccaggttcctcccaaaaggtatgggaattcaagatgagatttgggtggggacacagccaaaccacatcaatgaagctctctgtcgtatatgttaatgctgataatgtttttttgttttgtttttgaggagatcttagagacgaaaaaggggaagctccattaaaattggtaaaggaagaaacataatatgaaaggagggaaataatgaggtaaaagatgcagagactgctttccagacaaagtaagaatgaacttcactttggaataacaaagcagtgcttgcttggcaaggtgagtcttagaatctgactaacatcaacagggcagagtctcaggtaattaacaaaaccaggaaggaacagggagcagcaatgctaaaacacaagaaaccaggttactttgtcctacttcatagttgttattttcctaatcattggagataagctatgattaacagaaaaactacccatgtaaaatattgtcacccaacttttaagaaaaacaagaaagaagatacaaaacttagcaaacagaataagtaatttcagagaatcagaattaagacaagaaacaaatgtaattacagtaagtgtaattcatatcttcagagacatgcaagaagaggttgcattttagaaaatactgataatagctcttggattaaaaactcaacagatgttctgaagagaacaatagacatagttaaatatagatctagcaagtttgaagtttaaaagttgaataattttctctgaatccaatggctaggataaaatgaagaaaggtaaagggaggtaaagtgaagataaagaattgttgacgtaaagttgtttaaaatgctagaaaaaaaaggaaagtaaacataaagatggaaataattaaagaactaatttaaatattttttagaactagaaatactgtagacttgagatttaaagttttcatagaagtatgaacttatattaatggagaaattctactgatagacatctcttgaagaagcaatgggatactaacgattaggacagaatcataaagacttccagagtaggaggatagaaaggtaattttcaatggaataagaagtagatagaaaagaaaatttattcttaaacatgtagatgttgttaataactgggacaagaccatcaatgtctgaagaaattccaaaaataaaataataaaattaacaaacagatttttagaattacatctggcagtcatagagcgcaatagcatacttgaaaataaggaaaatatggccattttaatgatattgattcttcctatccatgagcatagaatgttttttcatttgtttcatcctctctgatatctttggtgtttttagttcttacagagatctttcacctcactagttagctgtattcctaggtatttgattctttttgcagcaattgtgaatcagattgcattcctgatttggctctccgcttgactcttgttggtgtatgggaatgcgagtaatttttgtatgttctttttgtatcctgagactctgccaaaggtgtttttcatcttaaggagctttcgggccttaagcttttgggcctataaagttttctacatataggatcatgtaatctacagacagggatagtttgacgtcctttcttcctatttgggtacctttatttctttctcttgcctaactgttttggcaaggacttccaatactatgttgaacaggagtggtgagagagggcatccttgtcttgtgcacaaaatacactaaaataaaattgcttaaaactagtgataaagaaaaattctcaaagcagccaatgacaaaaacacggtttgcacagaggaacaaaaaatgccagcaaacattttattggaaacaaagaaaattagaagataatgaagcaacatctttaaagtactggaagataaacattgtcagctggaaattgtagactcagagaaactatctttcaagatgtaggtgaaataaagattttgttctggcacttagaacctgaaataaatcatcaccagtaaaacagcactataaaaaatgttaaagaaaatgtttcaggcagacgtaaaataatatcaaaaggaaatttggatctacatagaagaatgaaaagcactggaaatggtatcaacatggttaaatatataagatccttttatttctgtttgaattcaattgattgtttaaacaaggggtcagcaagctatagcttcatgggtggactgcctgtttatgtgaacaaatttttactgagatacattcatgctcatttgtttatgtattatcaatgggtgctatagaattacaaaagcagaattaagtagttgtaacagagcctaatggcacacaagcctaaaatatttagcttttaaggaaagcatgtccggttctggtggctcatgcctgtaatcccagcattttgggaggccgagatgtgcggatcacgaggtcaggaaattgagaccatcctgggcaacatgatgaaaccccgtgtctactaaaaatacaaacattagctgggtgtggtggcatgtgcctgtaatcccagctactcgggaggctgaggcaggacaatctcttgaacccgggaggcagaggttgcagtgagctgagatggcactactgcactgcagcctggtacaaagctagactctgtctcaaaaaaaaaaaaaaaaaaaaagagagagaagaaaacaacattattaacctctaatttaaacaagaataataacaatttataatgagtttacaacatatataaaaataaatcacatgacaataacagaacaacagttaggataaaataatgaaaatgttgttattcatgatactgtatgtaaagtagtatattataatttgaaggtagaatgtgatgagttaaacatgtatactacaaactcaaaagcaaccattaaaattaacaatatagagagttttaattctcaagtaaaaaaggagataagatgaaaccgtaaaatatatttaattcatagaaaagaaggcaaacaagagggaaaataagcaaaaaacagatgggatggtaggggaagcaaaattttattaccatcttcttagttttttttttcctctgctaagcctgagaattaaattgatataagacagatcaacaggaaaatgcatacaaatttatttaatacatgtattatgtggcatgagagattctttaaggaaggaagactccatgacataatcacttatgttctgaagtagacacagagtagtaaattgtgaaatatgacaacacaaaggagctggaactagtgtagttaattgggtgaagaggtgattaacaggataagggttggtttaacaaggtatgtttgtacaggtttcccttgcctcaacttctcatcctgggtgatgagactgttactttccttcttgtataaagagggcaactttcatgtagaaattttacctcctacttttaagaaaaaggaaaatcagagtgctttaaaggaaaatcagagtgccttaaaggaaaatcagagtgctttaaaggaaagtcagagtgctttaaaggaaaatcagagtgcttttcttgcacctgctatttttcaagtgtctttaactcaaaaaaatcaatatgccaaagtggcacgtttcggggtatctggttctgaattccttcaggaaagatagaaagcaaaagcaaaataataggtttaaaactaaaaatatccaggtgcggtggctcacgcctataatcccagcactttgggacactgaggtgggcagatcatgaagtcaggagttcgagaccagcctggccaacatagtgaaaccctgtctctactaaaaatacaaaaaattagccaggcatggtggtgggcacctgtaatgccagctactcagaaggctgaggcaggagaatggcttgaacccaggaggcagaggttgcagtgagccaagatcatcgcattgcactccagcctgggcaacagagccagactctgtctcaaaaaaaaaaaaaaaaaaaaaaaagaaaaaaaaaatatatgcacacataaccacattacatataaatggtctaaatataccaatttaaaagcagattggatgaataaaacaagatctaagttattactgtctagaagaaattcaagaatatcctaataaaagatatctatgtaaaaacaatagctggcatcatacttaatgaagaaaaatcagtttatttccccctatttcaggaacaagatgagtccattaactcttagcactttgttttaacattccactagacgttctaccaagtaaaatagacaaaaaacataaacaaaagaattacagatgggaaaggaaaatgtagattggttttatttatagacggcatgtctctgtagaaagtccactgaaatctacaaaaacactgctggctataataagtgagttagcaacataaaaaagaaaaaaagcaacatattaaactaatatttccatataccagcaatgaacaataaaaaattaaaataaaagtactattaataatatcatgaaaaatgtagaagaattaggaattaatctatcaaatgatgtgagtctggtacactaaaactcaaaacactgcagaaagttaaagaagacttaaataaatggaaagatgtaatatgaatatgggttagaaaattcacatggtaaaatgtgattatccctaaatatagattcaatacaataccaattaaaatattattaggcattgtttataggaatttacacactaattttaaaacttcagtagaaatgcaaagagtctaaaatagccaaaataattcttaaaaataagaatatttttgaaggattagcacaatctaatgccaaagcttataaggctacagtaatgaaaatagtgtgatattggcataaagatagacagaaatgtcattggaagataatagaaaattcagaaatatatgtacagaattttggtaaattggtgttctccaaagatacaaaggtaattcagtaaataaaagatagcccttcaacaaattctgctggaacaattagatgctcatatgcaaaaagtagaactttaacacgtaactcatgatacaaaaattaatttagtacagatcatatgcctaaatgtaaaatgtaaaaacaaagtgaaaaaaaggaagaaaaattacgtataggagaaaatatagaaaagtctttgacctcaatactacttagacatgacacaaacaccatgtttcatcaaagtagaaattgacaactcgagttcatcaaaatgtaaaacatatgttcctcaggaaacactgtaaaacaaatagaaatataagacactactgagaacaatatttgcaaaatatatgtctggcaaaaaagttgtgtccagaaaatataagaactctcaaaacttgataataaatgtagcaactctaataaaagtaggcaaatggcttaaatgaatacttcttccctaaagaacatatgtagatagaaagtaaacacatggaaagatcctcaatatcattagtcattagggaattgatctgtgtctgtcaaaaatgggttgggtacagttgctcaagcctgtaatcccagcactttggaaggtcaaggcagcagggtttcttgaccccaggagttagagagcagcctgggcaacgtagtgagatcctgtctctacaaaaaagaaaaagacatggcatggtgtctctatttagctaggcatggtggcacatgcctgtagtaccggctactcggaagctgaggtgggagaatcacttgagcccaggaggtggagcctgcagtgaactatggttgtgccaatgcactccagcctgcgtgacagagcaagaacccatctcaaaaaagaaaaaaagaggccaggcacagtggctcacacctgtaatcacagcactctgggaggtcaaggtgggtggatcacctgaggtcaagagatcgagaccagcctgaccaacatggggaaaccccatctctactaaaaatacaaaaattagctgggcatggtgatgtgcgcctatatcccagctacttgggaggctgaggcaggagaactgtttgaacccaggaggtgtagattgcagtgagccgagattgtgccattgcacattgcactccagcctgggcaacaagagtgaaacttcatctcaaaaaaaaaaaaaaaaaaagaaagaaagaaagaaaaaagaatggctaaagttaaaaaggctggccatgccaagtgttggcaaaactatagaggacaaccaacatacatgcactgctaatggtaatggaaattagtacaatgactctggaaaaagccttgtcagtttttaaaatattttgacgtatgcacctatcatatgactgccaatcaatttgtagggaaatgaaagtatatgtacataaaaaacttgtaccaaaacattcacagcacttttttatgggagagaggggctaatagtgaagagcatgtaacaatcaaatattcattaacagatgaatgaataagcaagctttgatatatccatattttgaaatactacaagcaataaaagaaatgaaactttcatccatactataaaatagattaatctcaataaatatgctaattaatagatgccagatcaaaagagaacagtatgatatcatttatataaaaagaggcattagagcctagtagttaagagtgcagcttctggaagcaaaatccttagtatgattttggctcattgtctgcagcatttattttatgtgcgctcttgaggtttttacagaaacaatatgcctcagtttactcatctatataatgactatatcgatagtcatctactttataaaatatagtattttataatgtaatactttataatatatatttgatatatattttaaaatgtctttattatattttataaagtataaataatataaaataatgtctatagttgttgacttataaaaataaagattaaataaacaaaaatatgtgaagcactagtttactacctagaaaatggtacattttaaatattttcatgattgtaataaataaatgtatccttataatgttattttattaataataaacaaaaatttatttttagaataatgaatattataattatttttatttttagaataaataataatgaataatattattataataatattattattcattcttatatacctttgaaaaatcatagggtaagatgattgaaattctgtgtatagcatctcagcagatgagatatataagaaagaaccattgcacccccatttacttaaatcagttatagtttaagttgtttgaaaaaagtcatttattggaatcaccacatgacatcaatcaagagcaaagtgtgtagaatactgtcaagtttttctccaagaatttatttctgttttcaatttgcaactcactgaagcattgaacattttatgagctctacaactaacaatgcctgggaatttaaatattttccatggaatatgattacttcaaatgaaaaaaaaggagcagatatgataatgaataatttaccatgcgtatatggtacaaagtagaatctttaaaaataaagacacaaacagcaacaaccacaaaaacctcaattgtttctgcttttgttctatttttagtgaacttaaaattttaagagaaactctttctccttgtttttaacacatgtagagagaggtgtggaatattgtaaagctttttatctgattcggcctgagtctcaatagatgaagattcatcgagtttagtaggccgaatagttttttctaaaagatatgtgacgcgttaatccttggaatctttgaatataatgacacgttaaacagtgaatattaccttatacggcaatgcttgtgattaagttaaggactttaagggaaggggcttattctgaaatatactcacgggtctctaattcaatgacaaatgttctttttttttttgagatggagtcttgtactttcgcccaggctggaggggtgcagtggtgcgatctctgctcactgcaacctctgcctcccgggttcaagcaattctcctgcctcagcctcctgaggagtgggattacaagcgcctgccatcatgcccagataatttttgtacttttattcaaggaagggtttcaccatgttagccaggctggtctcaaactcctgacctcaagttattcgccctcctcggcctcccaaattgctgggattacaggcatgagccactgtgcctggcctgacaaatgtttttttaagagtgagtcagagggagacttgacacacagaagaggaggcaatgtgaccagggagcagagattggagtggcgcagcccccagaagctggggaaaaggaatgctggcatgagtaaaggaatgctggcagcccccagaagctggaagatccacagaatggattctctctagggacctcagagcgagtgtggccccactgtatttaggacttctagcctctagaactgttttagaatacattgctgttgttgaagtcatttagtttgtgtcaatttgttgtgatagcctagggaactaatataatgaagcatggagagagagagagagagagagagagaggataaaaggtgaaaatcatgtgccaaaactaaagaaaagagatgctgacatttgtgattaaatagaataattgcactatttaagattaatcacttgagcctgggaggtggaggctgtagtgagtcatcatggtgccactgcattccagcctgcatgacagagagagactctgtcttaggaaaaaaaaaaaattaaggtggtccagaatgcacccaaggataaaatgcaaagatgatcttgccccatgtatgttttagcatactacttaggtactatttattttttaattatctcctttttacattttgacaattttatcccagtggtcaagccttgtattagaaaagacagaaagaaggaaaagaaagaaggcaggaaggaaggcaaggggaaggaaaggaagtggaagggaaggggaagagaaggggaagagaaggggaggggaaggggaggggaggggaaacgttgctttggacagaataaatgggtaagggtttctattttaattagattaagattaattagattaaacctctgaggaagtcttacttgagctgagaaactaaatatgagagggaggagtaccactgcattggttatagatggggtagaagtctacaaaagagttcattgaggaatagagtagtaaataagtgacttaatgagtttgtggctgggcgcagtggctcaaacgtgtaatcccagcactttgggaggccgaggcgggcggatcacgaggtcaggggatcaagaccatcctggctaacacggtgaaaccccgtctctactaaacaaaatacaagaaattagccgggcatggtggcgggagcctgcagtcccagctactcgggaggctgaggcaggagaatggcgtgaacccgggaggcggaggttgcagtgagccaagatcacggcactacactccagcctgggggatagagcgagactctgtctccaaaaaaaataaaataaaataaaaaaataataataataataataataatgagtttgtattgttcttattttgcaaaagaatgcaagatctgggtagagaaagggcaagagggaggacttcccagatgaatcaataatattaacagtatcaatctgccactaataattatttaagaaaagtatttttctgctttcagttttatttattaaatagtttctgctagcctaatgttaaagtctgccaactagttccttcaagttaatcacattcacttttgattccctcttaacacattaagatattttataactctgtgagtttaaaatctgatgcaaattcattgtggtcaggcaagatgcaagaccagtcgggcaaatacacttcccttattttttatgggtctgaaatatcttttgtcttgggagatgtattattatacaaaagatctatttggcaatttatagtttgctttttatctattcaattgtttcctggtattcttagaacagaaaagcgaaccttttaagaataataacatgcaaattacctttaattactctctagctctttcagttaaacaaaaaaaaacctctcattttaggttcagtttgtaactgaatagaacattttatatctaaacccttaatggaaaggctttcctatttcccacaattttcttttctatttaatgtattctctaaatttaacacattatttaaaatgccatccatatacctgatcaacttgaaaagatggagaaacacacaagtaaagcttattatctgttcacattttattctatgtttccattttcataatcaaataaatgtagactgcaaaatacttatttacaaatctgtctgatttatataataaactctgaggaaactggaatgaagtagtgctacaagcaagggacagaataaagttttgtgtattaattacctgatttatactttagtccctttaagtaaaagaatgtaacaaatagaaggatagttattaatatatttggaggagaaagaaggataaaatgaaagatacaatgttcttaaaaaccgagagttttatcttttttcagaagtttaaaaaatatttaaacatttccctttatgttagcacatatttatgttatacatttcatttacaagtaattgtatggtaaatagttacaaaaacaacaaggaaaagctttgagttaaggagctcatgattttcagtgtaaaatacatgttatttgagtaatttgggaaactgacagaagctttcttgcagtcaagaatgctgctcaaaaattaattttaaaataaaaataaaagaaaaaaaatcctgaaagcttatgtagcaaaacaagtattgtagtccattacaaaaattagccttttctgaaatcatgttaaaaagcaaaaagatcttagagcagaatttcatgtacagttcattttgggattgatcttacttccttgataggtggtcttacttcatcctgttggagcccatcatggagagctgttttacaaatattcttagctctactactcacataaaaattcaacctatgactcctgtttctgataaagtagctatttaaattcattaagaatgtttcatcattttagtatgcaaaatgcattgttagattatgtaagtgacacatactatcttaaaagttaataaatctcccagaagaaattagactcagatgctatatttattatggagaattaagaaatacctaaggttactgtgatcatcacttacgagttttgaatcaattatatgagaaactaaagaagaagctttgactggaaaaaaaatgaaccaaaaagaaaaaaattatataaagtcattttattggacacacatgctaaaaattagaaaaaccatacattttactctatcgatctgttaggaaaaactatagaatatgatagtgattgcattgattctacttagcaaattaaatgcaaaactaagatattcaccaaatataaaatatagttattttctaagaaataaaactcacacattctggtggcaactgccatttttagcagaaaccaaaactatttcctgttaacatgaaggaaaaaccatcattgaacactcaagtaataatcaggggactaggatggactttcaataagaaaccactggaatatacctggactaaatctattctgacaaaattaagtataccaaccgaatagttttgtgtgtgcatttgtttttactatatacttttataatctcaaaagtacctaaaaggaggcaaaacaagaaaggatttgtctacagaaagtaaaaataagaatgattataaaatattgttaaagaaaagacactgcacagaatagtcatggagatttctgtactaatcaccttgatcataatgaataatcactgaatttcactggcctattttcctccacaagattctatgttaggtaagcaactttgggtaattcaataataggaaagatgtttcttttataacatatctgatttgtacaactatttgaaatacattttatgctataaaataaaaatggtaactcttatttacacagctatttattgtgaatttgtataaagacagctcatccttagaacttaatagactaggattcttggtaaagtatatattgtatatctgaaaaatgtaacagtgacaatattaaagtattgccacttagtgctgtgttacctaaagaaattgtcacattctgtcagtcttatcactgacatttaaatttcagatataggtgaattcaatattgaagtgaatagagctaccgatatttgctttcctaatattcatggaagttgttgttgacctctcatagataaataagcaaataatatcttcaaaaatatatctaacttgacttctaagtattttgtcatttgaagggatatgagcaagttgagaagaagaaatgtggagagagaaatattcatgaaaactaaatttataacattaaacaattgctcaattcttagaaatttaatcactacttatattttaaagcaaaatatttttgaacttatttagaaaaatatgacttcatctctcatatgtccattcaaagttttaaacaaagtataaaaggaaattaaacagtggaggaaatgagaaaggtcataggcattcaagaggtttcaacaaatttctggaggaatgaaaggtaattgaaggatgtgttaaaataatttctattattatctttatagatttagtgtccagtaaacattttataaacaatccaacttgctgttttgtgttcttgaactttatttaaactgaattatattgtacatatccttttgtgacttaatcataccactgcatattacgtttgtgagagtaagccacattaacatatctaaataaagttatctatgtttttctaaagtgtagtattccactgtatgaatctaccacattctactgttgtttaacttttgcattgcttatagtacttaactgagcctgtaaatattttggatcacatttcttaatggccaaccacgtacatacaaaataaggagtgaaagccaattgctgattagaatatatggtcatcttcaatattactgggtaatacaagcctctttttaaaacggatataatttccatttccaggaaagcatatgaaattattattgctctatatgtttgccagaagtctttcttgtcagactgtttttggtcaatctgttgtataagtaataatgtacatataaaacattttcatttgcatttttgtgttaaaaataagttaaagtgattctaaatatgtatggtggacacttatattttacattttataaagcacatgtgcaagccattttctttgttttactgtcgggttttctgtaatttttacctgggtttacatttaaatattgatcaccaaggaattgattgttacatattatataaggtaaagaatcactttaattattttccatatgtatagccagttttctcactctcatttattggcaaatttatttttcaccactgatctataataccagctttcttacatatcatgggttcttatattttccttactgtagtctacctattccatttcattgattatttattactttgttaataccacattgcattaagtcttataatatttcctgtaatatattcttccttcctcaataaattattaactgaattttaatatttttagagtttacataaattctagaattagcttgtcaatatctaaatcaaaccttactgggttttactttggatgcactagttacaaagattaattttggggagaagtgatttcattaaagtctttcaattcaagaatatatttatgtcaatgttatgtctatgtttatttgaactttatttaaactgagttatactgtacatattcttttgtgacttaatcataccactaaatattatgtttgtgagagtaagccacattgacacatctaaataaagttctctacttatatgaaatgcatttcaatattgcataatacgtttgtgtcaaagcatcttgctaaaagctcatattcattagtataatgtatcttacaatcattttgaattgtctgtgtacttagtgtcatcggtaacatagtaatctgttttctctttcataattcttatttttttaatatttacaatcctatcccagtgtctaagacctgcaaaaggataaataaaattgcttgtaccatctatgtttattttgttcccaatcacaaaggaaatattttaacattccattgttaagtgttataatttcaatagaacttttgaaaacaaatgttattagttaaactagattctcttttaattttgggttgttaaaatgtatgactttttaagaaaataaaattaaatatgcttataatattgttaagttatttgttgtggtgtatcatattaattgatatctttacatgaggccattattgcttcccagggtttcttagaataaacattggctgtgatgtcttacattttaatgcattgcttatttctgcgtggaacttttttaagttttccttcattattttcataaattacattggtgtttaatttactttccctttactatccttgtcaggttataatatcagagtcataatagcataataaaatgaaatagagtatgttctttcctgtttcatgctcagaaagaattgtatgtaagactggaattattgttttgtttcatgtttgaaacaacttgccagtaaagtcatcatggcttgaaattatctttatgatatgatttctgactacagattacatgcatttgttgtagcacaattcagatttttcttttcactttaggttacttttggaaaaatgcttgtttcaagtaattgcacacattttacatatatttccaaatttattgaaggttttcatactacactaatttaccttcttgatatttgtattatttataacaaaactcaataaacggtggcaaataagccagacagtatttataaataaagtattactggaacactgtcatgctcattcattgacatactgtcaatttatgccacaacaatagaattgattagttgcaacaaaccatatagcccaaaaacctaaaatatttaccacctgatcctttccaaaaaacaaaaaaaattcttgacatctgatgtataattatttcctattttgattcctgagattgcatacttgtttcttctcttaattttatcaagccatttctccagagttttgttattgtatggctcctacaacaactaacaaacttttggccatatttcttgacttttctttccctgtattcttaatcactatgcatgtattttttatttccttttatttctgttgatatttctaacttcttccaataaattcaaaacattttaaatattaatttgttgtcctcataaaataagaatttaaggttctacattttcctctaaaatgacacattttataatgtagtatacattttttaattaaaaatattttataatttccattatgatttgctcttgggtgttgagttactaagaagtatatttgtgaggtttttcttcaatatgactgactatagatattcgaatctagttattctcagaaagagaaagcaaagttatggataaataatcattaattccaatatctatattgacgggagtgctagagcaccacaagaagaaacttgaacacagaaaaataaggaagcaaaaatccagcagagattatactctgagggacttgatgttccatggaaaagcataggtgggggtgtcttttgctcctctcacccctgtggcagactgcttgtttctgaactgttggagagccctccattctcacaagcccaagcactggtgtgggctgcaatcttggaacaacttgaggacagagaacaaggctactatttcctgcagtgccacttgcccttcacccagccccaagatgaggtggtgggcaccatactagatatgcctctgtggtggacctctatactgcctttgagtgagagagaggcttgccccatcccgttgacagcttccttctccatccctgcgtcgagctatggctagatttctccatgagggcagagggcgagaggcgtgagaagcatcttctggaaggtctgcgggcaccctcctgcgggtggacaataagcgcctgggaggctgttgtccttggttggggagcggtcgtctggatctagcctagcaaagaggctgctccggatggggagggaatgaaagcccctgcggctcccacgcagatgcccacgttgcccaggccttcacagacccccaaaccggaaccgccgggaaaacgattgccaaccggccacaacacccaggcagggacgcggggagaggctgaccagaagaaaggccgacgtgcaagaaacccagcctccggcgcacagggaacatgtgtcccaaggcgcacgcacacacagacggacagagacagaaagagagggcgacggaaagagcgagaagggagagagagagagagagagagagagagagagagagagagacttaagagagagacagtagtgggcacacagacacgcacgtgcgcgcgcgcgcacacacacagacacacagacgcgcacacacacccccataacgcacacagatatacagcaggtaacacccacccccaggcagcccctgaagctgccgggttctgctctccgcgactacgagccaccggtgagacagcagcccacgggcacacagcgagacctgtcctcgacatcacaaggccgccacttttggggagactcacccgcacaccgtccgcgcacgcctgaggctgggatcccgcgctgcctccccggcgatctgtctgaggtttcttcctcctggggtttcttcctgctggtggaccctccgcgaatcccggcctccggagaccgtcccggtaactaccctggccggggctggtctcagccccgactctgacgcacgatcacacagggctcccacttcgccaagtctcagggacccatcccttggcaacggtggcggtcactgtgaccgaagcggcggctcgggcctcgcgcatgcgcgctggcgaggccgactcacccgccccacccccccttactcggcagtcaggctgcggaccctttaaaaaatggcggcgacgccgcggctgcggggactggggtggcggtgctggagcttgcggcggcggctgtggtgcagccccaggcggtgggtgggaagaggactaccagaggggcctgcgggagacccagggtcggacccataggagtcctgtcgtcaggacctccttaatcggtcttctgcttgggttcccggtgaaggaggagcttcggggtgccggctgggctgcgcggactcctcttgggatccgatgatggatcccacccggtgatcgggaatggggttacaatgcagtgaggcggaaaggcgctcgccagggcgcagaaagattccccagggccgcaaggcgtgctgtcggctgcaaaggcactgacccacgagcccactgcctccctccttcctgggtggagcaggggcctgccttcatctccaaggcccgggggctccggcatctcgacgcggcttccggcgacacgggcaaagagagacagagggtagtccgagccggagccagtgtgaccacacgtggccctgatgtcccccaagagcacatgcagtgagcccgtgtctctgaggccgtagtgggcgacgacgagacggacagtgatgtccaggcctgcgcccgggggccactggagacctgcccctcaaagcggaggaaacgccaagcgcacctgaaaacctgcgagacagggcctgtgcgcgagtccagtactcctacttcgccaagtctcagggacccaacccccagcaacggtggcggcacagagaggcgcacggcgccggcgcaggttcagagagataggaggctgatgggggggaagttgaggcacctggggcagagaagaaaatgcatcgccaagcggtttctgggtcatacacggacgaaaatgtcttcccatcagcccttgcgctggtccccagggaccctggcatccgtcgttggcgcccagggttcgcgtcgggccactaggggtaccccaactcggacagaaggcccatgagttgaatttgaagtttgtgggaatagaggtgaggcaccaggggcagaaaaaaaaacaggagacctcgcctcagacaagcagggcctgggtcccccatggatgaaagtgccttcccattatgctgtacgctgggcagagtggacagtgacgaccttagttcgagcccagggtgcgcttcgggaccgcttgcggtaccagaaagcgaacaaatggtccatgagcggaaggtgggcacctgaggcagagaaagtaaagaaacgcgctgccgagaagcagtgcctgggtccctcacggaggaaattgtcttctcgtcagcccgttcgctgggcactgacatccctggcgtctctggtttgatcccagggtacgcctcgggccactagtgttaccccaaggtgggcagaaagcccataaggggaaggtgaggcacctggggcagagaaaaaaaaaacttcgccgcagagaagcgcggcctgattccccacggacgaaagtgtcttctcatcagtccctgcactgggacctggggaccctggtgtccctggttcgagctcagtgtgtgcctcagccgctaagtgcaccccaaggggagctttgggagcacaaagcccatgagggaaggtgagttttgagggaggagtggtgaggcacctgtcacagaaaaagaaaaaaaaaacaatacgcgccacggagaagcagggcctgggtcccccacgatgaaaatgccttcccatcagctcctgctctgggccctgtggaccctggagaccctggttcgagccacgggtggcctcgggcccgctaggagtaccccccgtgcgcctctctgcgcctgcgcaggcgccgtgtgcctttgcgagggcggagctgccttctcctcagcacagacccggagagcattgccagggcggaggtgagttctcctctgcacagacttcggagatacagcaaagtggatcatgtgctcctcagcacagacccgggcgggcgggccaggggcaccgcgagggcggagctgcgttctgctcagcacacacccgggggacaccgcgaaggcagagcagcgttctcagcacagaccttgggggcactgcctcgctttgggactactcagagccgcatcgatggtgaataaaatccttcctgtttgcagccctgaataatcagggtcagagaccagttagaagggttcagtgtggaaaacgggaaagcaaaagcccctctgaatcctacccaccgaggttctccccagccaaggcgaggcggccgcagtgcgagatccacaccgcagcctcggaagacaagcgagcagaaatcccatgaggggcagttgaggtttgaggaaggcgaggtgaggcacctgtagcagaaaaaaaaaaaaccgcaccacggagaagcagagcctgggtccccaactgacaaaagtgtcttcccattagcccttgcgctgggcccaggtgtccctggcattcctggttcgagaccagggtgcgcttcaggccgctaggggtacccaaaagcgggcagaaggcccatgaggtgaaggtgatgcacctggggcagagaaaaaaaaaaaacaaccgcgccgcgtataagcggggcctggctcccccacagaagaaactgtcctcacatcagcgcttgcgctgcaccccagggaccctggtatccctggctcgagcccagcgtgcgcctcggcctgctaggggtaccccaaggcagacagaaggcccatgagggaaaggtgaaacacctggggcagagaaaaaaataaaaaaactgcgccgcccagaagtggggcctgggtcccccacagacgaacgtccctacccatcagccctgaactgggccccggagaccctagcgtccctggctcgaaaccagggtgcgctttggacccgctagtggtacctcaaggcgggcagaaagcccatgaggggaaggtgaggcacctggggaaaagcgaaaaaaacaaaaacaaaaacaaaaacgtcgcagagaagcagagcctgggtccccgaggaagaaagtgtcttcgcatcagcccttgcgctgggccccggggaccctggtgtcccagtttcgaacccagggtgtgcgtctggccactaggggtaccccaagtcggacagaaggcctatgaggggaaggtgaggtttgagggaggagacgtgaggcaactgtgtcagaaaaaaaaaaaaaaaaaaaacacgccgcggagaagcggggcctgggtccccaacggacgaaagtgccttcccatcagcccctgcgctgggccccatggacactggcgaccctggttagagcccagggtgcgcctcgtgcccaataggggtatcccaaagcgggcagaatgctcattaggggaaggtgagacacctggggcagagaaaaaaaaaactgcgccgcaaagaagcgggacctgggtcccccacggatgaaagtgtcttcccatcagcccctgccctgggccccatggaccctggcaaccctggttcgagccccaggtgcgcctcgcgcccgctagggttacccagaagccggcagaaggcccatgagaggaaggtgagacacctggggcaaaggaaaaaaaaaaccgcgctgcagagaagcgaggcctggctcctccacggacgaaggtgtcttcccatcagcccctgcgctgggccctggggaacctggtgtccctggctggaaaccagggtgcacctcggacctgctaggggtaccccaaggagagcagaaagcccatgaggggaaggtgaggcacctgcggcagagaaagaagaaaaaccgcgccgcggagaagcggggcctgggtcccccactgacgaaagtgtctttctgtcagcccttgagctgggtcccgaggacgctgacatccctggttcgagcccacgctgcgcctcaggctgctacgagtaccccaaggaggaaagaaggcccaaaagtttcagctgaggtttgagggaggagagatgaggcacctgtggcagaaaaaaaaaaaaaaaacgcgcagcggagaaccggtgcctgggtcgaaagtgccttcccatcagccactgcgcttggccccatggaacctggcctccatggttcgagcccagggtgcgcctcgggccgctaccggtaccccaaagtgtgcagaaggcccatgaggggaaggtgaggcacctggggcagagaaaaaaaaaacctcgccgcggagaagcggggactgggtcccccccacggacgaaagtgtcttcccatcagcccttgcgctgggccccagggaccctggcttccctggttcgagcccacagtgcacctcgggccgctaggtgtaccccaaggcagacagaaggcccatgaggggaaggtgaggtttgagggaggagcggtgaggcacctgtggcagaaaaaaaaaaaacgcgccacggagaagcagggcatgggtcccccacggacgaaagtgccttcccatcaggccctgcgctgagccccgtggaccctggcgaccttggctcaaacccagggtgcgcctcgggcggttaggggtaccccaaggcgggcagaaagcccatgaggggaagttgaggtttgagggaggagaggtgaggcacctgtggcaggaaaaaaaaaaaaaaaaaccgcaccgcagagaagcggggcttgggtccggcacggacgaaagtgtcttcccatcagcccttgcgctgcgccccggggaccctgacgaccctgattcgagccgagggtgcgcctcggtccactaggggtaccccaaagcaggcagatggctcatgaggggaaggtgaggtacctggggaagccaaaagaaaaaaaaaactgcgccgcggagaagcggtgcctgggtcccccacggacgaaagtgtcttcctatcagcccttgcactgggccccgggaaccctggcgtccctggttcgacctcatggttcgccttgggccgctaggggtaccccaaggcgggcagaaggcccatgaggcaaaggtgaggtttgagggaggagaggtgaggcacctgtggcagaaaaaaaaaacgcgccacggagaaggggggcctgggtcccccattgacgaaagtgctttaccattagcccctgcgcttggccccgtgcaccctggcgaccctggttcgaacccagtgtgcgcctcgggccgctagccgtaccccaaagtgggcagaagcccatgaggggaaggtgaggcacctggggcggagaaaaaaggaaaaaacctcgccacggagaagggaggcctgggttccccacgaaagaaagtgccttcccatcagacccggtgctaggccccagggaccctggcatccctggttcgagcccagggtgcgcctcgggccgctgggggtaccccaaggcggacagaaagcccatgaggggaaggtgaggcacctgtggcagaaaaaaaaaaaaaccgcgccgcagtgaagctgggcctgggtcccccacttacgaaagtgccttcccatcaggccttgcgctggacctcgcggacactggtgaccctggttcgagcccagggtgcgccttgggcccgctagggttacccagaagcgggcagaaggcccatgaggggtaggtgaggcacctgaggcagagaaaaaaaaaactatgccgcggagaagcggggcctgggtcccccacggaagaaagtgtcttcccatcagcccctgagctgggcccacgggaccctggcatccctggttcaaaccagggtgcgcttcgggcctcttggggtaccccatggtgggcagaaagcctataaggggaaggtgaggtttgagggaggagaggtatggcacctgtggcataaaagaaaaaaaaaaaaccgcgccacagagaagcagggcctgtgtcccccaaggacgaaagtgccttctcatctgcccttgtgctgggccccggggaccctgtcatccctggctcgaatccagggtgcgcctctggcctgctaggggtaacccaaagcgggcagaaggcgcatgaggggaaggtgagtcacctggggcagagaaaaaaaaaaacagcactgcggagaagcggggcctgggtcccccacgggtgaaagtgtctccccatcagcccttgcgctgtgccctggggaccctggcatccctggttcgagcccagggtgcgcctcgggccaccaggggtaccacaaggtggacagaaggcccacgagggaaaggtgaggcacctggggcagagaaaaaaaactgtgccacggagaagcggggactgggcccccacggacgagagtgtattcccatgaacccttgcgctgagccccagggaccctggcgtccctggttcgagtccagtgtgcacctaaggcggctaggggtaccccaagtcgaacagaaggcccatgaggggaagtgaggtttcagggagtagaggtgaggcacctgtggcaggtgtccatctgtaaactacttatccatgtgagccctgatgtccaccaggggctggatgtccccctggggctagatgttcgcctggagcctggtgcccacctggggcctgatatccaggagaggcttagttatccacctatggccatctggagccagatgcccacctgaggtctggtgtacacctaaggcccgatctctacctggggcttgggtgttcatgtggggcctgatgtccacctaagaccatgtgttcacctggagcctgggtgaccatctgggttatgatgttcagctggggcccagagttcagctagggactgggtcaaccttctgcttgttgcacacctggggactaggtacccacctgggctccagtgttcactggggccttgtatttacctaggaccagtgcatccatctggggtctgagtgccctcatggagcctggagttttcctggggactggggtctgccttaggcttaagtgtacatctgtggcctcatgtccaccttgggacagatgtccacctggggacggatattcagtaggggcctgagtgtccacctggtttttgatgtctacctggggcctggtgttcatctgaggtgtgatatccacctggggcctggacatttgcctggaacctgatgtacagctggtgcctgaagttcgtctatgcctggtgtctccctggggccaggtagtcaaacacagggcctgaataccttctagagttcagtgttcacctggggtccgaagtccacttagggcttgggtgtccaaatagggcctggtgtcagcttgagatttgtgtatttacctagggcctggttgtccacttggggcttgatttttcacttggtttttgtgttaatcaggggtctagtgtccacctggggcctgggtatccacctagggactattgtccggctggagactaatgactaactatggcctggtaatcacctaaggctttgtttcacttaggtacttggtgccaaactgttgcctgctgttcacctggggtatggtgtccacctggggtctggatgtcagcctggggcttgttgtatacatgtatcttagatatccagataagggtctgttttctgcttaggtgcagcagtccatctggtgcttgagtgtcaacctaaggcctgatgtctatgttggaccttgggttcacctgaggcctgatatccacctggggcctcaatgtccaaatggggcctgatgcccatctgggtcctgggtgtccacctgcagcatggatgtccactggtactttatgtccaccaggggcctaatgtccacctaagacctggtgttcacctggggtctgatgttcagctgaagacaggatgtccacctggagccgaggaatccacccagggactggtgttgaactggggcctgatgaccacccggggacaaggtacacatcaggcttgttgtccacctgtcaccagatgtccacctgagtcctgatgtccatcttgatcctgtttgtccacattaggcctgatgtccagctggggcctaggtacccactgggggcttcctgttaacctggggactggtgtcattctggggcctaatgaccacctgggttgtattattcacctagggcctggtgtccacttggggcttgagtgtaaccttggacctggcacccacataggattgggtatcaaactggccccttggtgtccagttaagacatcatgtgaacctggcgcctgagtgtccacatgggtccaaatgactactgggggcctgaatgtcaacctagaatctgaggtttactaggggcctaggtatccacctggggcccaatgtccacctgagcctgggtgtcaacctggggcctgatgtaaacctctagttcactatccaccttgggcttaatgtcaacctggagcccgatgtccacctgagtactgatgttcacctttgacctgatgtccacctgtggactgtttatccacccatggcctgatgttcacctggggctgaatgtccaactgtgacctgttgtgcacctggaacctaggcatccacctgcagcctgatgttcagctgggctgggacctggagttcacctgaggcatgatgtccacctgaagcttgatgttcacctgggggctgggtgtccacttggggcccaatatccacctggagactaggtacccacctgggatctggtgttcactcaagattggtgttcagctgtggcctaatgaccacctgggtcacggtgtctaccttggactgggtgctcacctggagccagtgttcactgggggcctagtgtgcacctgagactgggggatgcacctggggcctggtgtctacctggtgcctaggtatccacttggggcctaatgttcatctggaatctgatatccacctggggccttgtaattacctgggttctgggcatccacctagggcttgagtatcctcctggggccttgagttttactagggactcgtgtctgccttggacctgggtgtatatctgttacctaatgtacaccttgagagtgatgtcaacctggggacagatgtcctcttggggtctgagtgtacacctggtgtctgatgtctgcctggggacttgtgttcaccttagacctgatattcacctggggactgggcgtccacgaggggctgatgttcagctggacactggatatccacctggggcttggggatccatccagaaactgatgtcaaactggggcctgatgtctacctgcggactaggtatccatgtgaggcttgatgttcatccacggccagacgtccatctgatgcttgatgtccaccttactcctgggtgtctactagagacctcatgtccaactagaatttaggaacctactgggggcctcgtgtaaacctggggactggtatgaagctgggtcctaatgatcccctgggtcatattattcacctagggcctcatgtccacttggggcttcagtgtcaaacttaggtcttgtgttcatctttgacctggtgtacacctgggacacctacggacttggtgtccaattgaggtgtcatgaccacctggggactgaatgtcaatctggggtctgatgtaaacctctagttcagtatccacctggggtcagatgtcttcctagagacttatattcacttttgacctgatgtccacctggggacttgttatccatccatggtctgatattcacctggagacagatgttcaactgtggtcagaagtgctcctggggtctgggcttccacctggagcctgatgtttagctggggctagagttcacatggagaatgatgtccacctgaagtttgatgtttacctggggcctgatacctacctggtgcccaagtattctcatgtgcctaacatccactagttggcctgatgttcatctgagggcttggtgtcaaccagtggctttatgtacacctggattctagtgtcctcctggggtcttatgcctaccaggagtctggtgtacccctggggtctagtatccacctgcagtctgggcgtccacctggagcctaatgttgaggttagactgagtgtcagcctgaggcctgatgtctactagggcatagatattcacctggggcttgttgtttacctggggactaatgtcaaccttgagcctaggtatccacctggggaatagtgtccagttgcagccagatgtccacctatggcctgaagcatggttgttatcctaagtccttgtattagtccattttcacactgttataaaaaactacctgatattgggcaacttatgaggaaaagaggtttaactgacccacagttcttcaggcttaatagggagcatgactgggcgggctcaggacacttacaatcatgatgtaaagccctttttaccatgtgggaggaggagggagacagaagggggatgtgctacacactttcaaataaccaggtctcgtaagaactctatcacgagaacaccaagtgggaagtctgcccccatgattcaatcaccattcaccaggctcattcttcaacccatggggattacaattcaacatgagatttgggtggagacatagagccaatatcaggcctgatgcccgcctggagtcatgtctacctgaggcctaatgtagacatgaggcctgggcattcacctaggacctcatgttaagataggggctggagttcttttggtgcctagtgtatacctggggcccagatgtataactagaacctgatgtttcagatggaaacctgggccccaggtgctcatcagatcccacgtgaaaactcaggcttcaggtgcacatcagactccaagtggacacataggccctaggttgataccaagatttcaggtagactctgggtcccagaaaaacaccccgccctaggtggacagctgaacctgagtagacatcaggccccggattgacatctggcctcaggtagattcctaggcccaaggtgaatactcagtctcctgccctaggggaattcagtcttaggtgattaaggactggtgttcctctggggcctcatgtctacctgggccctgggagtgcacatggagccagatgtctataaagggcctgagtgtccactagggcctgaggttcaccaggagcatagacatccacctaggacctcgtgtccacctaaaacctggtgttcacctggggcctgggtgacaacctgggatctgatgttcacctgaggcccagagttcagctggtgcctatgtcagcctggcacctgatacacacgagatgactaggtgcccacctgaggactggtgttcatggggaactggtgttcagctgtggcttgatgagcaactgggtcctggtgtcctcctggcaactgatgtccacctgggacttcatgcttacctagggcctggtgttcccctggggcctggtgtgcccctgagatctggggtccacctgggcctagtatccacttggggcctcatatccatctggaacatcatgtccacttggggccttgtagttacctagggactgggtgtccttctggcacttgggtgtcctcctggggcctggggttctcctggggcctgggtgtacatctctggcctgatgtccaccttgggtggatgtccacctggggacagatgttcacttgtggcttgagtgtccatctcgtgtctaatgtctacctggggcctggtgtttgcctgaggccttatatccacctggggcctgggcatccatttgaggcctgatgtctacctaagacctggtgtttaactggggcacagacttcttcctggagcctgacgttcatctggagcctgaagttcacctgtgcttgttgtctacctgaggcctatgtgtcaacctagtgcctgatgaccaccctgagttcagtgttcacctggggcctgacatctgtctggagtctgggtgtccacatagggcctgatgttggcttgggaccaaagtatttacctagggcctgggtgtctacttacagcctgacttctacatggttcattgtgtcaacctggggcctgatgtccacttaggtcctaggtaagctccttatgactaaagtccacatgggggctgaaaccatctcagaccttgaacctagggcttagtgtcgacctgagacctggtgaccccctggggtcaaggtatccaccttgggcctgatgaccaactggggtttaaggatctacctagagactggtgtcaacctggaacctgatgtccacttggggtctggtgtacaccttgggcctgatgcccaccttggcacaggtgtacactttgggcctagtgtgcacctgaagcctggctgtcaacctgggtcttgatgcacacctttagtcaagtgttaaactggggcctgatgaaatactggagcctgatttacacctgtgtactgggtctccacctggggcctgatgtccacctgcagccagatatccacctggcaccagatgtctttgaggaatctgggtgtccaccttgaaaatgatgtattccaagagactaggcatgcacattgggcctggggtgcacctaggtcctgatgtctacctgaggctggtattgagctggggcctgtgtgttcgcttggagcctgatgttcatttggaacctggtgttcacctaggacatgggtatccacatggatcctgattttcaggtggggagtggatatagatctgggacctgatggccacctatgctataagtaacccaaccacctgaggcctgatgttcacctgcagcctgatatccacctggtacctgtgtgtcaatctagtgcctggtgtccagttgaggactaggcagacacctggggcttggcgttcaccaggggcctggtgttcatcttgcacccagtgtccacctggaccctgtgtatcaacctgtggcctaggtggccactgtagctttatgtgcacctggggcctgagagtttcctaggatctgatgaccactggggcccaggtatccacctgggatatcaggcttcaagtgtacacccaggctccatgtggacaccaggccaggagaatgccagcccttatctgaacatcaggtcctagatagacgcccaggctccatatgtacatcaggccccaggtatacactggactccaggtggacaccacactcaattggatacacacacttaaggtggataccaggccccacgtgaattcctatactccaggtgaacatcaggtcccaagtggatacctggaccccagatgaataccagtctctaaattaataccaggcctcagatggtccttaggaaccatgtgggcattagtcatcaggaagttacctaggcccaaagtggacatcaggccccatgttgacacagatctagttggaagtcaggcaccaggtggacacccaggccctaggtaaatacttaggtcccaagttgacagcaggccctatgtgaacactcagaactcaggtggacatcaggcctcaggtggacatctgagttcatctggaacctcatgttacaggccccatgtaaacaccaggccttagatggatacccaatctctaggtagacatcagagctcagattgacacaaagactccactagacataatgtaccaatgaatatccaggcgcccggtaaatacccaggccccagattgacaccatggtctatgtggacacacaggccccgggtagtaaacaggcccaaggtggacactggactggacatcaggtcctaggttgacaaccgtgctccaagttgacaccaggccccaagtgaacatctggtcccagctggacactagtcccctggtgaatacctgggctcaaggttgacatcagaccctatgtgaacactagaccccagataaacacttatgccctaagtggacatcaggcctcaggtggttacccagtcccaaggtgaacatcaggaccccgatgggcaccagttatcaagtggattcctaggccccaggtgaatatcaagccctaggtggataccgagccccaggtggatacctggatcctggtagacatcaggtcccaagaggacactagaacccaggagtacattaggccacaggttaacacgaaggccccagatgaataccaggccaacttgtggacatcaggcctgagaagggtccttgggctccagggggatatcaggccccaggtgaacatccagcactcagatgaacattaagcttcaggtaggcatcatgcctcaggtgaactccaggccccagctgaacatcaggtcccacgtggatgcccagaatcctggtgcacatctggtcacagttggacattcaaccccaggtgaccatcaggccatgggtgaatacacggtttccaggtagacatcagatcaaaggggaacatcagtcccccagtggacatcaggcccaaggtggacactcaactagaggtttacatcaggccacatgttgacacctagtcccaggtggacatcaggccccaggtggatacctaggcttccagtgaatttcagacaccaggttgacattcaggcccccagtggtcatctggcctcatgcgaacactcagaccccaggtgcaaatgatgtctcaactggataccaaacccctagtttgatacccaaggcccaggtggacaccaggtccaaggctgacactcaagccctaagtgaataccaaactctaggtgaataattcaacccaggtggtcattaggacccagctggataccagtccccaggttaacagaaggcccccggtgggcacctaggcaccagctggacatcaggccctatgtaaacacccaggtctcaggtgaacaccatgtcccaggtggacatcaggccctaggtggacacggggccacaggtggacatctagcccctgggcaacatccagccccaggtggacataaccatttccatggataaaccattcccaggtggatagcaggcctcaagaggatggcagtcaccaggtagacatcaggcctcagatagacaccaaggtcccagatgtacagcaggccccaaccgaaccccagactcatgtggacatcaggccacaggtagacaccaagccttaggtagatacctaacttcaggtagacatcagacccaaggtggacacccagtccccaggtggacagtcaggccccaggcacacatcaggccttaagtggtcacccaggccccaggttaatatccagttcccaggtgatcaccaagccccaggtagacaccaggccgtaggtgagcaacaggatgcagtaggtcatcaggccacagctggataccagtccctggtgaacacaaggccccagtgggacacagatctaaggcagacattaggccccaggtggatctgggtggaattcaccctgagggggacattcggccccaggtacgcatcaggcctcagctgaataaccagtccccaggtggacattaacccacaggtcaaccacagtccccaggttgataccttgtccccaggtggctactcaatctgcagggtaacattaggcccctgtaggatcccaggccccaagtggattcctaggcccctggtgaacatcaggtgcaggtgtccaagtaggccctgggtggacataactgtgtacaggtaaggagttgacctatggggaggatgagcagtcagaagcccactggggtcctgcgtaggtcttctggaagggggaggctgaggggatggaaccttaaagaagcaacctcacttctttggcaacagaccctaacagaacttagaattctggtaaccaggccaggcacggtggctcacacctgtaatcccagcactttgggaggctgaggcaggaggatcatgaaaccaggagatcgagaccagcctgaacaacatggtaaaaccacatgtctactaaaaatacaaaaagcaaacaaggtcaggagatcaagaccatcctggctaacacagtgaaaccccgtctctactaaaaatacaaaaattagccgggcgtagtggtgggcgcctatagtcccagctactcggggggctgaggcaggagaaaggcatgaacccaggacacggagcttgcagtgacccagatcacgccactgcactccatccagcctgggtgacagagcgagactctgtctcaaaacagacaaacaaacaaacaaaaaacaaacacaaaaaaactagccaggtgttgtggtgcatgtcttgggcctgtaatcccagctactcaggagactgaggcaggagaattgattgaacccaataggcggaagttgcagtgagtcgagatcatgccactgcactccaccctggccaacagaatgagacaatgtctcaaaaaaaaaaaaaaaaaaaagaatcccgataaccaggcacccacatcctagagttagccctgtagccagctcacttggtgggagatgctcaagagagcaagacgttcttgtgctgcatccccacagctcaaggctcctgcttcaggaatggcaggagtgagagcctttcttttccaacgatgcccttgtaagctcatcgctcaccccagatgcctctggccatttgacagaaggtccccccaggtaccacaggacaggagtcaccaggtagacatcaggccccagatggagctaccaggccaggcctcaccagtgatcccaccagggccacatctgcacattgtccttgtccagctggagcctctggagctcattgagacacaggcacatggtgaggtcacctgcagtctggaagtctttccagggacaatgttttcaggctgaaattcctttaaattcagtgaggttgttttcatgtttggaaattccagtggaaagtgagtgatattggtgacctctctccttttgcagctcctgcttcaggtgcagaaacacagctatttccagtgccagctgttgagccagtgccagcaccaggggcagagccccttccagggacagcgctggagctagaggaagctccagagccctcctgccgctgccctgggactgcacaggaccagcctagtgagaagctgcctgacttcatggcacctcctgtagagccactggcctcagccctggagctgaaagtgtggctggagctagaggtggcagagagggggtgaccagcacagttccagccagcagctcccacactgctcccagtcctgggcacagtggaagctatggaggcagagaccagggtgtgcaacctgggctcctctgcctcactggagagggacttctctcattcagcagagcagcagccctgctgctgaaggccctgccgctactgctgctggaggtgtttgcctgcctgcaggaggtgctggagagcaagaaaaggagcctgtgagcaggggttccagcaggtcctcctgctcccagaggcgacctcctcctccaggaatggaggtttgccctcagctgggcatctgggccatttgcctctaatgtgctgcccaggatggcctcttcttgacaggtggacaggggttgagggggccagggggcatctccaaaggaagctcttaaactcagcagcagcactccagaatctccatgcctgcacctgcccaaggatttattcatagcttaactaagaatttcaaatttctaccataacactgaaataaagtttgactttttgaaacttccatgacttctttcactccctaatattgtagatggtgtttttgaggtgacgttgaaaacctctgatagttgtgtattttgttgtggttctttgggtgattaaattaccatctgatcaagtgatattgaaaacccttcaggtatggcttttagaagactttgacctatttttgcttgtgttgactctccctccagctttgtggaaagagggatcatgtaggttcatttctcaggcagatcagtcaccttttgctatcaaagttttagcatccatttcgaaaatttgatgtacaagttgatattttggtgtttttagctaatctggggtcaaaacagaatgccatagatgaggaagcttataaacaaatttgtttctctctgttctggagatggcaaaattcaaggtcaagtggttagcagattccatgtctggtgtgggcttgctttgtggttcatagacagccatgtttctaccatgtcctcacatgacagaagggatgagggagctttctatggtgccttcaataggggctactaatcccactcctgtggtccctgccttcatgatctaatcattccccaaggccctacctccaaatatcatcacatagggaattagatttcagcacttgaatttgagggggacaataacatttggtctgtagcatcaggttacccagagccttatgcattcggaggaaatccaaaatcttctataagtgtttgctggtcccctccgggcttaggggaatctttaattgcagctcttgattcagcttggtccaagccgaaattctacgtttgcctgagtaacttgttcatgggacagagggaagtatagaggcaactgaccatttggagtttaggacaattgatggaagagggcttggcatctggatgagaagtggagggagaatagaacaaaggcacagaaggagagagcacaatgagaaaggggaagagggacatctggacataagggccaactggagggcagggaaggtaattttccttgcattttagactcagaccacatatcacatcagaatcacctgagggagacgttttcaatgcatattcctgggtttcttctcttggaaatttgtattaaatcttgagttgtgctgatttatccatatttatcataagaattttggataattcttactttgagaggcccaggcagtggatcacttgaggtcaggaattcaaaaccagcctggccaacatggtgaaacctcatctctactaaaaatacgaaaattagccaggcatggtggtacatgcctgtagtcccagctacttgggaggctgaggcaggagaatcacttgaatcagggaggcagagatgacagtgagctgagatcacaccactgcactccagcctgggcaacaataagactccatctcaaaaaaaaaaaaaaaagaattgtggataattctgatgcaattagaaaacaaagcagagcttgacaaccactgggttgggatgtatatcaggaagacatttgattatgtaaaataactgcaaagcaaactgaaggggaaatattttaaactgcttgaatataattagataattcaactcttcctatgtatgtagtttgaccacgtatttgatgtctgctatactaagattggaaatgtgtagaagtgtttttaaaaatcaggtagaagcacagaaaaaaggagttggagagaaaagaaaactagctattgtctggtaacaagagaagagaagggaaacgaagtagcatatttttgttcattgtttgatggcatctaaattataatcccaaatatttttttctaagaaatccaataatacaagtattcagagtggagtaccaacactgatttactgggaaagagaagtgtaatctgttttgctgcataatgttgagggagaaggaaaggaaaattagttgagtaaacaagtaagagactggtcctcagggaagctgtctgcctgaaaaatcacaactactgcacctacagataagccctgaacagataagcatgcagggtccagcaccgatgccttctgttctttgtgtaattggcaagctcccaggtaaaattttcctccccttttcaggcatatacatggcggcctctgtgggaacttgcacagggaggaggggggcttacctaaaacaaacccacagttatacaaacaggagaagcccactttgtgcttgactagagacatacccacagctggatatataaagagaattgtgcagacagttttatatatagctgagaggagtttcttataaaagctttttgattcaactgtaaaaacggcaatccacttggacgcccttgtctgctgcagagagcttcctccttttgcttattaaactttcactcccacctcacccgtgtgtccctgttccttaatcatcttggtggtgagatgaagaactcaaggtgatacctcacaagagagactgctacattgtgttgcattggtgagactgcaactttaagaagtgtgacttttattgctgctgaattattttatctcctacccagttgaaaataaaggatataaagtgcttaggttgaacacaaagtcctctgctctaggtaacatcttcagcagccacattagcagaggcatgggtggtaatggtggaatagatgtctctttgcttctgacagggtgtctgcttatgtgttaaacaaaatagtatggtatatatttcattaagaaatctgctaaaaaatgaagtaaaagaggttcatgttcttaagaggcacaggatttgctacggcagcaagaccaaaaggcttaagtaacaaaaatgtgcatagtagttacaaacattttcatctaaacaaaacaatgtgagcatctgcatatgacaataactcatgcaaaaatatttttaactgagattgaaatcattttatacataacgtgttatcactgtattctcaggtaatatattgtttgtatatagatgttataaataataacttatttaagttattcatcatttatacaacaaataattctttggaatctacaaaatgctggttttgttctagtcactgaatgtacaaattgatttaaaatatgtgttcttagagtgtggtagattaaaaaatacaaaataggccgggcacagtggctcacacctgtaatcccagcactttgggaggccaaggcaggtggatcacctgaggtcaggagttcgagaccagcctgaccaacatggtgaaaccccatctctactaaaaatacaaaattagccaagggtggtggcacaagcctgtagtcacagctactcgggaggcagaggcaggacaatcgcttgaacctgagaggtggaggtggcagtgagccgagattgcaccattgcactccaacctgggcaacaagagcaaaattctgcctaatatatatacatatattgtgtatatacacacatatgcatatatggtgtatatacacacatatgcatatatggtgtatatacacacatatgcatatatggtgtatatacacacatatgcatatattgtgtatatacacacatatgcatatattgtgtatatacacagatatgcatgtgtgtatatacaccatatatgcatatgtgtgtatatacatatatgcatatgtgtgtatatattacatatatgcatatgtgtatatatattacatatatacgtgtgtgtatattacatatatgcatgtgtgtatatattacatatatacgtgtgtgtatatattacatatatacgtgtgtgtatatattacatatatacgtgtgtgtatgtatattacatatatacatgtgtatgtatatacatatatacataatatataatgtatgcatatgtataatatacatatatatctgtccaatatatatacataaatacatatattaaatatatatacacatatatattggaagttgtactgctgaaaacaagagctaccaacaaaaaaatttcaggaaacctagtgtgattatttttaatagaaatcaatattttaatacaggtctcttgttttttcttgtggaaataaatgacaagatggaatttctgggtgtttggtatctgaatatttaagtatagcaggtatggtcagtttttcaaagacattttaccatcttacttgtccatcggcaactcataagatatgtggaacaacgtcctctccaacaacctctagtatcagtctttgtaaagtttgtcaattaaatgggtgttttttagtttttgtttttgtttttctttttcaaaccgtctcaccctgtgacccaggctgtagtgctgtggcgtgatcttagctcactgcagtctttgccttccaggttcaagtgattctcctgccttggcctctcaagtagctgggactacaggtgccccccaccacacccagctaatttttgtatgtttagtaaagacagggtttcaccatgttggccaggctgttctcaatcctgacctcagatggtccacctgtctcagcctcctaaagcgctgggattacagtcatgagccaccgcacttggctggattttctttctctctcactctttctctctctctctctcctttaagttctgggataaatgtgcagaacatgcagttttgttacacaggtatacatgtgtcatggtggtttgctgcaacatgggtgtaggttttgcaggtaattattatattattaaaagataacagaatacctagctaaaaaaaaaatgcaaggaggcattgatgggcacatgtttactgagcacatcctgactccagaattaaaaatccaatttatgcctctgtagtccaataaaatttttccttaagaatccagggatcagactttcatctcagcaaccactccaatatggtttctcacctactcattccaacgagctgctcatatcaaaatataagtgctatccatattgttaaattataaattgaaccataacttctcggccttcatcttaatttatatatcagcagcatttcacacagttgatctccaccttctctttgtaaaacttttttatagaattccagaacacttaacttactttccccccaccacgtttttgataattacccctagtccttttttgcaggtttcatctttactattttttaaatgttagaggaccattaggctcaggactttgacttcttatctttcttatctttgctttcttactaatttttgtgtcattaatttcctgatatttcatattacacctaaacactggacactacacccaacactccctgacttttccacgtggatgtcagttaagaatctcaaaattaatatgtctgtatggagccactgaaactcccaaaatttgctcttccccattctgtttaatggcaactcccattttatagtttctcagctcaatattcttggtgtccccttttaattctgtctctgtagctctgtcactctcttcctgtatctgtctgattctctccctctctctcctctctctcttgctcactctcactcttgctctctttccctgcttcacacacacacaaacacacacagacagacacacacacacacacacacacattttcagatctgatgtgtatggaattcctgccagctttacctttaaagtgtagtaattccaaatgttgttgaaaattcaccttcccacccccaccacttggtaactatagcgctttccacacaaggccaagtgcacagatttcttggggaaataatgagaactattatacactcttatttcaaggacccttaaaattataggattgccatatttgatactaatttaagcttctgtcattgcccttttttcaatccagtctccacacagctaccacagtgtgcaagtagaagtctcagccatatcaccaaactcctgctttaatgtccctactccattgcttcttttctccttcagaagagtttaagcttaatgaagctgggcaactttacatatttttccatgagctggagatcacttggtgtaaggtaaaaatgatcagtaaatattttcaaataacagaatctacgaataatagtcttgtttctttgagagtacattgacttttaaaaatcaagaaaatagattggtcaagagaattctgcttgttttgattttgttatccctcgattagattaactgtgttagtataaaagtcagtgtggaaagctataagcaattcctaaactttaaaatgaaaggcatggaatttaaatatctgttccttttattcaagcaaccaaaaaacataactttttaaatatattttatgtatgtatgaaatctaaatttatttttctctctttatccctgaatactttttaaagttattcatgtcctcattattttttaatccacttcagtcacattttaaaatatattttcgacttcattaagaatatctttgtgttccactgaatagcttgccaaataataaaacattagcagtataatttcctcataaactttatttaatttgcttggttaaacatagatttcctactctcaactcataatttcattcaagtataatatattctacttgacatttgcagggttttcataccatgcatttgtcattgaaattggtttttgatatttgaaccactagtttataattgtcttgttggttagactggtctgtagaatctttctttgttttgattctgtggtttattcattatggaatagctgtgctactgtaaattttgaggtcaaaagcttaaaacattttatgtattttaaaacaaagtggatggcatttaaatatctattccttaaaatttggaagaaaggttaacaccatataaacccagagcctgttttttagattagtagcatgtagacattttcaatttcttctaaagttgaaaaaaataaacattttatattcatagaatgcttgatgaaggtaaatatttaattttcacttaaaagaaatttggttacattgaaaggaaatttggctaatataagtgagatacatatctaattaaaacaataatttaagataaataatgctcaaagaacagtggtcgttgcatttattccagagagaggacaattatcctgatctggctgtaataacgtagtaggtagaactgctggcgtggacacccaagcaaggaaggaaagctggtgtctcaaggggtcccactgagatggaaagggctcagggcccagactgttgatgtcacctggacccaaccaccacatcttggaagaagaaatgaccctcccttcctggtgttgccccaaacaaggagcttagcagtgttgcacacaggatagtccttgcaggagacatgtttgacaagctgctgaggtgcctgatggggccaggctttttttcatgaaatgagtttgcatcctgaggaagcctctttattggaaacctggcagggatccaatttcccctttgccttaaccccgtaggagcatagtagatagggaggaggtcacccaggtggctgttcctgcttggcccccacttcccagaaccttccaggcagggagagccgctgagatcactccatgggctgctcacatggggtctggacccagccgccctcctgtgcctggcaggcagcccctgggccatcacaggacccactgtgtggtgatcagtggcccaccacctgcccttgtggtgggtgcggttcacaggtgctgccccagtcctggcacactggccttcccagcctggcccaggataggggatgtgaatgatccttgcctgtgccccttcagaccatgtgaggttggacactcactgcagaagtccctccaggtcccttttcaactgagttgtgggggacttgcttagtcctcatgcccagggtcaggggaggggtgcagagtctgcaccctaaatcccctagggcctgagggaggtctcccaggttatctctgtcctctccagtgacatgagtcctcccagatggcctcagccctctcaggtgacttgcttccatggtgactctggctcttgcaggaggtgggctactacagggacatgagctgcctaactgccatcctcctcctgtatctgccagaggaagacaccttctggggactgaatcagctgatggctgaggagaggcactccctgcaaggtaggcggacagctacccccagggcctcatgcagccaggccatgggacggccaccctggctgggcgatcctgacttccagacaaggcaccttccttgctttccagcttgttaggagccttcaggacatccctgctgagggtcccacaggggcccagagctgaacagggaccctttcacttcaaggcagacacctttcattcccaacagcagaggccgctgcagcctccccctggccaccctgtgtgtcccagagccacagccctctagccctgagttcatgcaggtgactctcacttccccaagagtcctcctacctcccagctggccacactcccagctgcccccccagcccacagatgggccgatgaagtcaagatggcagtgtctgcccatcccatgtcccctagccagaccccatgtccaggagatggccatgtagtccctcggcacccacccggttccctccactggccactgcctgccgcagccctgcctcacagcctcaaaggcaggcctgccctcctggtacctttacccaggatgctgctgtgcagtgcctccagctagggcccacctctctagagctgaggccacatggtagggtcacctgatggaagggaggaaggcctcagggtccggggtcccctgccactgcccagctcttccagctgatggctccacatcttgggagtgggctctgatgcatgatgggtcaggggcttctcaggtttctacagcccaaatgctgcccagctctggaggctcctatcccaccaggggcaggtataacacaaatccttcccaaagatcatgcggtacctgctgagtggatgacaccctcaactctttcccagaggcccagggtctcatggggcagggaaacaggggaagatggagctccttgcaggcctgacaaaggggctgagtcccaagccaaggcctcacccaagatgaggattctccatgggtttggagttgggtttccttttcctgccctggaggaggaggaagaggtactaggatgggggctgagctccagctgagcagggttaagggaagtgtgtccaccaggcatctgtgcatgggggagttgttgggaaagcactggccactgcccagtgttctgccccagggcagctcagggggccctgagcacctagggtccaggaagtgccgtgcattgaggtttgttgagttggctcctctggtgttttgttgatgtggtaaggagacaaatggagaccccaggacagggactctcctgtcccacaagtgcccagctcccccaggaagacctggctcaccccaagtcagcaggaagcacaggaaagtttctgcatggcacagaagccaggccctcctcaagagggggcatcacacagcaggggtcaggattcaggcccgctgctatttccacattattcattttataaggtgatatggtttggctgcgttgccacccaaatctcatcttgaactgtaatttccataatcctcatgtgtcctgggagggacccagtgagaggtaactgaatcatggcggcagtttccccatgctgttctcatgatagtaagtgagttctcatgtgatctgatggttttataagcagctggcatttcccttgcttgaggtgatgaatgccccatttaccctgatgtgtttattacacattgcatgcctgtgtcaaactatctcatgtaccccataaatatatacacctaccatgtactcatataaattaaaaataaaaataaattttttaaaaaagtgtgagttttaaaggtgaggtttgccctccagcgctggtgcctgccaggtgtgaccttcacatcatctttccacatggtccaggcccccatctgcagaggccaacagttcccagagtgaccttcctcagaaaacagggtcttggaggagacagtcagaggagggggcctcgtcctccccactgcacagccccttgtggggattggaagtgagggtctctgcccacaagttatcagtcaccctaagctgttttgtgggaggaagcatagggaatataggtcagtgctgggacagcgtttcctgatcctgacttggagaaggtgttaaaatcttgacattcccgacacctcctttgtgagagcccctgtcctgcaggtctcacagggttgttgtgagggtcacctgtggtgatgggtttggaagtgctttgtgaatgacacagtgggccttcctattcctgtcattggcctttcgaccttcaatactaattgcctggggatctccaggcctcaaggtctaatcctggaagggtatgagatgtccctagtggaatattctacacctcctgggaggtctctcacttcaaccttcacctgacataacccctgctcctgttccctcaacctggagagcttgcccaggagcacatggtagtactggactgacctctttggaaagggtgattacatcctcatttcagctctccctcctcctagctttccacgtagaaatccagggctccatgcagcatttgctggacatgaggggaaaacttttagggcagggatctgccctgggtggggacagaggagtatcctggagtctgagtgtcaggagtgtgagacctgcccagctggccagcccctgtccccatgctgctcgatgcatgatgtttcctgcacaagcttcctttagagggaagcttccggagtgactgcagtgagggccatgctgttgggggtgacagagcagccctggaggccctctgctcttaccctggcaggaggtggccaaaaagaagcaggcagaggaagcttctccaacacgcttggaaagaaatttccacatatcactcacgtcactcttgccactagaaggaaaatttctacagtggagtggaagaaaatgactatgctgtgagagagaatggatgcatccagaagagcaaggcaggagggaaatgtgcccattgccataattttgtgtcttttgaagacatttgccagaattctacttttgaaggctgccccttttgacagtcacttactgaggaagctgtgggacattttcaaagccttttatatagaaaaaaaaacacaaaatatactgctgtgggtctgtgttcagagactacgaagagcacagatgccactgttctgtgtcgcagatgctgtgggaagtgccttaacacacagaggtttgcttcatgcaaccgggtgaggaacatctctaaaacattttacagtcaaggaaattcagtgttcaggaggttgaatgcgttatccaagatcacacatatgtcctgacagattcggggttcaatgaagaattatgtattttaattaagaattatgtattttgattaataattatatattttaatttcacattttaaatttctgcagttttcttccatcacttttcaccatgctttctacacttggaattactttttttgacttcttgatcttctttacttgtatgttattgattttctacaagttttaacatatatgattaaagagtatttcttaatgttttaataattatcctagaataaaatatatttactttgatgtatgcattggatattacagtgtattgtgtacattttcaaacactttgtgttataccagaagcattattcaacagtggtcatttttttacctgaactatgttcagaaaatctttccaccacagtacaaaaagatcgacttcattttgttaacagatggatgtgccatagtgcaattaactgtttaattatcctgttatcctgttgtggatatttaagttcaaacaatgcagtaataaatatgcaagagtgcttttagacattaaacaatgtggctctaaattaggaactagtgcctgtaatcccagcactttaggaggtcgaggtgggtggatcacctgaggtcagaagttttaagaccagcctggccaacatggcaaaaccccgtttctacaaaaaatacaaaaattagctgggtatggtgatgcgcacttgtatccccagctactcgggaggctgaggttggacaattgcctgaacccacgaggcagaggttgcagtgagctgagatcctgtcactgcactccagtctgggggacagagtgagactctgtcccaataataaataaataaataaataatctagaagtacaattgcttagccaaatttcttatgcattttgaatgataagagttactgcctaatttctgttacaaaggctatggtaatttacactcaaaacacagaataggttggttgttgtcacatatggagtcttactgttgccgagactggagtgcagtggtgtaatcctagctcgttgtagcctccaacgcctaggctcaagcaatcctcccacctcagcctccctcccaattaactaggattacaggtgcatgccaccacacccggctaattttattcttagatatgggatcttgctatgttgcccaggctggtcttgaaatcctggcctcaaggtgacctcagcctccagtgtagctgacattacaggcgtgagacactgtacctggctgaatgagtgcctctatcctgacacttgtgtccccacgggatcctgcagaattcaggaccctgtccacacaggggaaaactctctgttgcagtcctgatgactgagaagggagcttacccatggctctcttggtcatttttatttaatagtgagcacagaacttcacattttctggaatgttcccatatgattttgtgagagaaaagagaatagagaccccaaccccaagctcactgtgtcaaagggaaaattaagcttgggaactgagttacgcaatactgccttccttgttctcaaacacatagccataacttcacaaccctgtgtcatagcctcatccataagccaggttcccacagtgacagaaggccacatgtctcctcagatgtcctccctcacaatttgctgtgaacccctaaatctttcagaatgcacatcccacctgtaaactatccctaaaagtgagtcggctcaatttcaccctgacaatctcaattaccagcttattttcatagttctgggacaaggtcaggaccagaaatcatccctctgcctaccctgagatgaatgaatcattgagttttcctctactccactccctctattcacatgcttactttatcttatgtaaaatggagatttactgaatgtgagatgaatgcataactgtttcctctgctccctcctttcctatgtaaaatgtagatatcctgatgctaatcagagccacacaagaatgcaagcatttgcttcactgcctaccttcagtctcatgggagttctctggatttcttgtatcagcatgtggacctctttagcaagattgaggacagtttcctgaattatatcctcaaaaacatttcccaagttgctcactttctcttcttctctgttagaaatgccaataagtcatccgggcacagtggctcatgccagtaatcccagcactttgggaggccaaggtgggaggatcacctgaggccagaagtttgagacctaactggccagcatggcgaaaccccatctctactaaaaatacaaaaatgagcgaggcatgctggcacacgcctgtaatctcagatacttgggaggctgaggcacgagaattgcttgaacccaggaggtggaggtttcagtgagccaagatcatgccactgcactacagactgggtaacagagtgagattctgtctcaaaaaaagaaaattccaataagtcatagattttgttcctttacctaatcctacatttctcaaaagtttggttcattatttttaaattctttttttatttttgtctgactgggttgattcaaaggtctggtctttgagctcttaaattatttcttctatttggtctagtctgttgctaaggctgtgaactgttttttgaaattcctatagtaaatttttcaatgcaagaagctctgcttggttctttctcaaaatggctatgttgtcattcaaatccaggatcgttgttatggggttgttgttggatttcaactttctgttggattttggtgatttttttttgccacttatatcttgaatactatacctgtcatttcagacgttccattctggttaggactcattgctagattgctggtgtaatcctttggaggtgatggaacattctggctttttgtattgccagagttcttgtgatggtttcttctcatctgagagacttgatgcttcctttgttgaatttgctatcatttggaaagaggttttttttttaaatttttcattctttctttctcttaagggtatgactgtggtgtatgttgtataggatcattttgcttcatttctgggtactttcagaggaccaaggctctgtacaagttccttggttgcagataggctcctgtagtggcttggtgtggtgatgtatttttgtttggtggtgtaattcaggcttcagtccagtagacggtgcttaagagtaacagctggctgcagggtcttctcctctgtgtacttgtcctcgacaggtgcagaagtgacgaagtgccaaaagcaccctgtcccagtgtgtactagtcttcagcaggggcagagctgctggagaaacctaagaagcagcctctttcagcccatgttccttgggccccaacaggatgaccactgctggatctgcagcagtgcactaggaaggggacagagggcaagagatgaccacctctctaaatctgttcccaggctttggtgtgcccctttcagcagctgatatcgtgatcatgtttcctttgacccaaggggtggctttggcaagctgtattcctccttcccttagggctggtcctcaccaaagtttaggtctcctggggaatggggttcacctccctcttgtttcttggagctgatggagtactctctcaactgaccaagggagcaggctgagacacccagcaatgacacacacagaccagttccaggttgcaaagctgttcttggctgcaagtctcaccatccttgagaaacctctgctttagcaactctcttcccactacagtcctgcaagaggagagagcctaattccaacacttactgctggggcactttccacacttaacactcaattctggctgttgaggctgctcccctgctccagagcaagcactccaattcctagcccaagattaaagtgtctgcagtggccaccattgccaggcaccaaaaaatgattgactttgtatgagcccagattaaaaaggtcatccttctctcagtcccaggtctggggaaatgcctgcagcttttctgagtgtctttcctctttccccatctctcagccacttttgtgctagctccaaggcttgggagaaacagagtgctctcccttaatctggattgcacagatccccagtgaaaatgtgagttgcagagggagactggctgctcttctcttgtactggagtttcactcccttttatgaaccaaatgctatcacagagtctgctttcccacctccccctccacagggtctggagtgtttttctgtattcctgtgaattcctatttttcttcttgaattgaagctcacaaagtttatctttatgcttatttttctacttccaagtggctgaggcacactgaaagcccctaatccatcattctaggaaaaaaggatggtttaaataaaggaatgttcacataaaatatatattaattagtgcaaacatattttatttgacatgagttaggtgaatctttgatatattaattaattttaaaattgttaaataaaattagaaatatcttcgaatttgccaaggtatgtttctctcctgggattactggtcagttttattttttccttggatagacattttaagccataaatcttgacatagacctgatgtagacctccatacctttcccagatgtgggacggagcaactgggacaggtccatcctagcactaagggatgattaaacctaacttgtagtctttgtacaactataaacatggttgatgctttaagagaaagatcttgatggaaagggttaaatgtaaaaattgatcatatgaattgggtcattcttatcacaccaaataaaaccaacaacaagccagggggaggaggcattcagggcaaaaacaccactccaaaagcgtaattctctgcatgcctggctgctgaaattacctgctttaagctgaaaccagttttatcaaatggttactgaaacaacttcttgaacactaagactagctttacccaccactgtccctcacctatcagagcctgccagctctcaaaaaccttactggtgccagtgaactttctcaaagagaaatacataccgtttttctctctgtctcccttttttataaaacctctaactttctctttatgttttggacatactaaagacacccattctgcatgtatgtgtgaaattgtaatacttgtatctcaaataaaacattttaatttcagatgtttgtctctatatttatttgactttgacaatctgatattatttagcattatttccagtctcccaaataatgtcaaaattttgttatgttagataggaatatcttgttattcaacttgaaggtaaactgcttgatcaatgcatgtaattccttgacagattgtcagcacctctaagacaacatgtagatattgctcattattaacacatttcatcttttcatgataaattacaaaaatttaattttcatttttaaaatgcaaaccattatgccttgtattatggcattcttgcgttactataaaggaatacctaagcactacataatttatactgaaaaaaaagattgacttggctcacagttctgcaggctgtacaggaagctttgcattggcagttgcttgacttcaagaagggtcctcagggagcttttacacatggcagaaggtgaagcaaaagaaggtatgtcacatggccagagcagcagcaagcagggagaggtgccacacacttttaacagccagatgtaatgagaactcactcactcttgcaaggacagtgccaagaggatggtgttaaacatgagaaatcagccttcatgaccgcatcacctcccaccagaccccgactccaacactggaaattacaattcgacatgagacttaaagggtacaacatccaaactatttcattccatccctggcccttcaaatctcatgttcttctcacattgcaaaatacaatcatcccttctcaatagtcccccaaaagtctcaacctgtttcggcatcactcgaaagtgcagtttcttctgagacaaggcaagtcccttccactgatgagcctgtaaaatcaaaacaagttatttacttctaagataaaattggggtacaggcattgggtaaacattcccattacaaaaggagaaattggccaaaagaaaggggctacaggccccacacaagttcaaatcccagcagggcagtcattaaaactcgatgttccaaaataatctcctttgaaaccatgtcccacatcctgggaacatagagcgttcccacgatgcatagggtgggctcccaaggccttgggctgctctgctcccacagctcttctacactgaaggcatgagctgctggtggctctatcattctgggatctggagggcagcagcccccctcccacagctccactaggccgcccccccagtcaggaccctgagtggggcctccaaccccacatttccacttggcactgtcctagaagaggtcctctttgagagctccagccgtgcatagtcttctccctgggcatccagcctttctcatacatcctctgaaatttaggcagagaatgccaagcctccttcactcttgcactttgcttacctgcaggcttaacgccacatggaatccaccaaggcttatagtttgcacccactgaagccatgacctgagctctatctgcagccctttgaaccaaggctggagctagaagggccaggatgcaaggaacaccctcctgggggtggtacaggacagtgatgccctggccctggtccaagtggaacaggaattaaaagaaattaaagaatgtgtaagcagaaactcagttgtatgtgagaaaacccaattccccctgagaaagagaaagagctggagccctttacaaattaactgcctgtttttctgtggctagtgagcttcatctctccttctttcccaggcattgtgaagaccctgtttccctagctgtgcagctgcaaggtcactagacagataaactcaagtcgtaaaacatgtttttccttgaaaagtaagaaatgatataatgcatgtctcaattaattgaataactgtctttgtttctcgcttctgtaatatgcttccccctgcacagatctccccactccccaccaccccacaaaatgcttaaaagttaacttaagtctttgttcaggactcagtcctttggatgttaatctgactgggccagtgcacctaaataataaatatcctcctcaaccccatcagtctctctgattccttaaaaaatcccactacagcctgggcatggtggctcatgcctgtaatcccagcactttgggaggctgaggcaggcagatcacgaggtcaggagattgagactatcatggctgagacagtgaaaacccgtctctactaaaaatacaaaaaattagccaggcatggtggcagtcacctgtagtcccaactacttgggaggctgagacaggagaatggcatgtcccggaaggcagagcttgcagtgagctgagattgtgccactgcactccagcctgggtgacagagtgagactccatctcaaaataaataaataaattaattaattaattaattaattaatttttaaaatcccactacacaagaaaccattctttcatcctagacctctaggtctgtgctaggatgagctgctacaaagatttctgaaatgccttcaaggcctttttttaattgtcttggctatcagcacctagctctttttcagttatgtaaatgtctctaataagtggttgctccacagcctgttagattcttcccctgaaaatgctttatcttcctttgccaaatgggcaggctgcaaattttctatacttgtatggtctgcttcccatttaattgtaaattccaactttaagtcatttttttgctcctgtgtctgagtgttcaaacttcctcagatccctagtacatgaacagactgcagccaagttctttgcaaaggcataacaggcatgacctttattccaagtctcagtaagttcctcattttcatctgagaccgcatcagcctatccttcactgtccatatcactatcagcattttggttacaaccatttaactagtctctaagaaattcagaactttccttcatcttcctgtattaggagcagtccaaactcttccaactcctgcccattacctagttccaaagtcacttccacactttcaagtatctttatagcaatgccccatgtctcagtaccaatttgctgtattaggccattcttacattgctatgaagaaatacctgagactgggtaatttataaagaaaagagctttgaaaagaggtttgtatacctgcaggctgtacaaacatgattctggcatctgcctagcttctggtgaggcctcaggaggctttattcatggcagaagatgaagaaggagcaggcaggcacatcacctggcaaggcaggggaagcaccacacacttttaaacaaatagatcttgcaagaattcactcactctcacaaggacagcaccagggacaggatgctagaccatttctgagaaatccacccccatgatccaatcacctccctccagacctaccaccaacattgggggtatcacaattcaacatgagatttagagggaacaacatctgaggtatctcatgcctcatgttgtgacttggtataatgtccataagattacactgactttacacatcatattgcagtttttgctagctcttctgtagtaagaaaatggaattcatcagcaatgccttctaagtctggctctgttttcccatgcagacttttccctgagctctgcttgtcagtcttgctagaacctcaccctaggcagcaacctccagtctgagattgcccttgacagtggctgaggtttgcattgttggaatggattagaaaaaacaaagggaagacagaccaaaacacatttaaatacagatcccatttgttgaagttttaagtaattttaaatgtttatttgcaccagctgcccactcccattgtactctcctcacccaaaaaggtgacttgatattctagtaaaaagccaaactgtgctttagagaaacccacttgttacttctttaaatccatataattttgccaaagtgaatttttgttaatatgctctggcagaatcagtaaactaattatttacaccagagtcacttaacctttcctcttggtcatttgcatgtaaattatttttatatgtataaaatttgcttactcaagaaagctcttgctatatatatatatattttttttttgtggtatcttaacatactctagtcttgtcttgaattccttaagactttgaggtaaagaactctcttgtaacaagtttccaaatcaaagtgggaaagaggaagattaggttaagcattaggtcatcaggtatgtaggacagctaattccattatcagaatggtagtgatagccagtttgcattttgcatattagttgtaacaaaaatattcagcatattagtgacaaaaccaaagttattgtgaatcagtttataatttattttttgagatagggtcttaatctgtcacccaagctcaagtgcagaggtgtgatcttggttcactgaagcctcaaccacctgggctcaagagatcctcccagcccagcctccttagtacaggtgagtgccaccacacccagctatttttttctctactttttgtagagattgggtctcactttgttgccaaggctgttctcaaaatcctgggctcaagcaatccttctgcctcaacctcccaagtggtgctgggattacaggtttgagccaccgcacctggccagtttataatgttaatggcttttggagcaggaaccagtgggtgctgcctcttgtctgcaagatgaggagtctcctctccccagaagtgaggcatcttctaccacaagggaggctttgcccaaacagtcaccgaaaggctgagattgggaagggaacaaaacaggagtgaatatgttcctggaacctaactgctccccaattcaactctactgcagacattcagaatgaaggggacattcagctgaagaacaggagttaaaagaacagctgttaaaatctcagattgtaaaaacaattttgcttcattttccctaaataatttttaaacaattgttcttaggtgatattctaaacttcgggtaatatctgtgacttagtaaatgttctttaaaagatgggataatatttttattttgtttaattatatgtgtttttaaactaattttataggaaaaataatttctttccttccctgttataccaaatacagcctttagctcaagacacaagaaattccaggaaaactggaatgtaagttcaatatgttgcactaagtacatttgaaagtgcatgcatttttattttaattcatcattctcagtcaactatcgcaaggacaaaaaacgaaacaccgcatgttctcactcatagctgggaattgaacaatgagaacacatggacacaggaaggggaacatcacactctgggggctgttgtggggtggggagaggggtgagggatagcattaggagatatgcctaaggctaaatgtcgagttaatgggttcagcacaccagcatggcacatgtatacatatgtaatgtatacatatgttaatgcaccaattctgcatcaagtcagtgcaatcagagacactgcaagaatgacttttggttttcttttcctagtttttggaagtttctcaagtctgtcatactggactctatattacatctcgaatttttttcacttactatagatctcctatacgctcaattgtttagctattaccttaacatttaccctgtgaacccatgacatttgaggctgccaaagtgattattacatgataaaacatatacttggttaaaggcaatatttaacaattgtaaaaccaataaatcaataattaaatctttctggcttagacttaaaactgcttaatttagtcatatctctacccacaacatagagattccaacaagggttgaaagtagagttggcaagcatttccattctcttctgggataataattcttactaccaacactggttctgaccagtgaaattcaaaatcagtgaaacactacccagagtctgagtgaaccaaaaatagtttcactttaggaaaaagtctatatccttagatgtgagtgattctctgtgaacattttattcactttaatatatttaaagaaaatctttctgaattggtgtgttttctttagtttgtattctgatactttaatgctaaaagctcttgattttaagttttcatggaggggctatctacataatttttatacatcattatatgcatcaataattaaaaaggagtagaaattttttcactaattgagaaatattatagacctaacaaaatgagggcaaactataagcaatttggggaaactataaggatgtaattaaatagtcactgtttttagaaaccattaactgcatattgaaatcttaacacttgttgggaaaacgaggtggtaaatcaacttgtcagcatgagtactaaataaaacaaaatatggttaagttcagatagtagttctgcaatttctgattttaaatgtttctgcaaaatagtttatctgaacgattaaactattattctgtgttcaccaaccattaagaaaatctgctctatggccaggttaaacctgaaagtggtacaattcaaaacttgatgtaggcaataggtatgtataatgtatttattctaatatgagagggtatatcaaagtaattttcttggggcacagtgtcaaaacaaagcaatgggatttggccatggacatttcattattatcaaagagacttggacactaccttagagtaataactttattatttaacaaagatgttttataaaaagaacaacaaaatgagaggaatagaaatcacgcaggtaaaacagataatctgattttgtgggtctcagagcagagattagtgtctttcagtttcagagtaaatgacctcactgcatttctctgaactgtcatggttgtcacaaatatactgtgttctaacacactccatgatttaaggtctacaaagtaacaaaggcaaaataacctatatgctctaccatattttcctcaattctagtgttcttcaaagagagaatgttttctctaaatctaattgagagtaattctgtatggatcggtaaacatttcttcaggcagttggagtaatatgtgtctagggctaactcagaggggtcttttatgtcttttaatagaagctaactatactcttgtgatatgataatcaccatcattgacttacagtttctaaggtttgaaggtatattgaacactcaaggggctcacattcttactgattcatgaatctcttcaggtccagggaacttagtatttttcaagagtgcaaaatgcctagagacagctgggaacaaatgaatgtcattcctgatactgtgcttatagttacttgagtttcatctcagaaaataaattgtctggtgcaatatttcttacaacttagttcctaaatgaactcaacaaactagttcttttgttttattttattttattactattatactttaagttttagggtacatgtgcacaacgtgcaggtttgttacatatgtatacatgtgccatgttggtgtgctgcacccattaactcgtcatttaacattaggtatatctcctaatgctatccctccccactccccccaccccacaaccgtccctggtgtgtgatgttccccttcctgtgtccatgtgttattgttcaattcccacctatgagtgagaacatgcagtgtttggttttttgtccttgtgatagtttgctaagaatgatggtttccagcttcatccatgtccttacaaaggacatgaactcatcattttttatgactgcatagtattccatggtgtatatgtgccatattttcttaatccactctatcattgttggacatttggattggttccaagtctttgctattgtgaatagtgccacaataaacatacatgtgcatgtgtctttatagcagcatgatttataatcctttgggtatatacgcagtaatgggatggctgggtcaaaaggtatttctagctctagatccctgaggaattgccacactgacttccacaatggttgaactagtttacagtcccaccaacactgtaaaagtgttcctatttctccacatcctctccagcacctgttgtttcctgactttttaatgattgccattctaactggtgtgagatggtatctcattgtggttttgatttgcatttctctgatggccagtgatgatgagcattttttcatgttttttggctgcataaatgtcttcttttgagaagtgtctgttcatatccttcgcccactttttgatggggttgtttgtttttttcttgtaaatttgtttgagttcattgtagattctggatattagccctttgtcagatgagtaggttgcaaaaatttcccccattttgtaggttgcctgttcactctgatggtagtttcttttgctgggcagaagctctttagtttaattagatcccatttgtcaattttgtcttttgttgccattgcttttggtgttttagacatgaagtccttgcccacgcctatgtcctgaatggtattgcctaggttttcttctagggtttttatggctttaggtctaacatgtaagtctggaatccattttgaattaatttttgtataaggtgtaaggaagggatccagtttcagctttctacatatggctagccagttttcccagcaccatttattaaatagggaatcctttccccatttcttctttttgtcaggtttgtcaaagatcagatagttgtagatatgcggcattatttctgagggctctgttctgttccattggtctatatctctgttttggtaccagtaccatgctgttttggttactgtagccttgtagtatggtttgaagtcaggtagtgtgacgcctccagctttgttcttttggcttaggattgacttggaaatgtgggctcttttttggttccatatgaactttaaagtaatttttttccaattctgtgaagaaagtcattgatagcttgatggggatggaattgaatctatcaattaccttgggcagtatggccgttttcatgatattgattcttcctacccatgagcatggaatgttcttccatttgtttgtatcctcttttatttcattgagcaatggtttgtagttctccttgaagaggtccttcacatcccttgtaagttggattcctaggtattttattctctttaaagcaattgtgaatgggagttccctcatgatttggctctctgtctgttattgatgtataagaatggttgtgatttttgcacattgattttttatcctgagactttgctgaagttgcttatcagcttaaggagattttaggctgagacaatgggtttttctagatatacaatcatgtcatctgcaaacagggacaatttggcttcctcttttcctaattgaatgccctttatttccttctcctgcctgattgccctggccaggacttccaacactacgttgaatatgagtggtgagagagggcatccctgtcttgtgccagttttcaaagggaatgcttccagtttttgtccattcagtatgatattggctgtgggtttgtcatagatggctcttattattttgagatatgtcccatcgacacctaatttattgagagtttttagcatgaagcgttgttgaattttgtcaaaggccttttcttcatctattgagataatcatgtggtttttgtctttggatctgtttatgtgctgaattatgtttattgattttatgcaagaataatctaaatttctctggtgaaagaacctaaacatgccttttaaaaatttatatatcatttcttttgtaaaacctaatgaaaataacaattttgtctattgtaaaaggcaagtgatcgcagcagatggaaatcactttatttcctatatctttgtaaagataatgactgctaataaacaacatgaagaattttcaggtataattttgataaaaatttaacggttttgtgcttctaggccaaatctgcaatacaatccttcataagattgtactttgaaactctcgttgtcatctgacatatgcagataatagagaaatataatcccctttctaaatgtttacattctctccctggtacgaattagcttgctggaaacatcagtaatcactgacataaagatcccactattaaataaaacggatactttttaaaaacatgcagcaaataagcaacatttcataaaacaacacaggattttatatgttccccactccattagaggctattatgctgaattggatcctcattccaacctgtgtccatattttagggttgaaatagtctaaaacccaacatttactgttctcctgttgtgatatctatatatctaatatgttcacattctctgtattcatctatgttaatatatttaaaaaggaaaagaaagggggctttaggaagaactttacatcacacgtcagagtaaacatcaaatcaagttatcaatttactaataaacccatttaagaaaaaatattcagctagagagcaattaaccttattgtctttgtgtctgatccatatttctccacctgatacatggaaataaccagagagatactataaaatacctcaggtgcattgttgaaagtaatttcctgcttttgtgggataactgaaacataaacgtaaataagatagtttgaaagttcactttctcatcaatgctcaaataatttattctaataaagcccagcaaaacttagcttgtaatgccatcaaggtaaatatattcatgaagtactcacttgctaaatttttaaacacaatacattatctcatctttaatttttagttgttatttcaattatccattgctgtgtatagcagtcatcaaacttagttggttaaaacacaaactcacaatttgttaactttggttgagctcaggaggataatattcggagtcttgcctaggtttccttatatgactgacaaggcctacatagtccaaagagacatcactcaaatatctggcagttcactggtgctatcagctgggttctcctccacttagtctctctagtagagtagatcaggttctcatttggcattggtgccattttaatttgccaagcctaaatttactatcatttgtcaagtgtctattaagtcagtgtcagagagggctatataacgatatggctatgaggagacttaataaatcgagggttctttgatataacaggctacccagttacatttcttgttctaaagattttttcagatacaacaaacaatattttacaatttaacttgtagatgaatgagtttcctgggatataatttaactaagcaaactctttcatactaaaaatcttatgacctctttacccatcttaggttttaagattgatatgagaggtattctggaatagaaatccaaatttaaggctagagtcaagagtgctgaagataagactcttatctaaaggaaaatcaagcaattgctatgtcttgcaaaggccagtgagcagacagaggggagagaatgcaattgccccaaataaagactcactttggaactcagtgattatatgtgtgcatatatgtgtatatatgtatattatacatgtgtatgcatgtatatatgtatattatacatatatatgcatgtatatatatgaatatatataaaactgaaaactgcacacatcccatatacaccatatacatgaaagtgaacacacacacatacataaacatatatattcagtttcaaacaattgttagggaacctgaggaagaaactaaatggaatataatggttgcatctatgatagccatggtactagaactagtagtagttctactaaggtgagaattgacatagtaaaagaaataagatacaaagcagtaagagagagctacattttccttaaggccaggctgaatattcactaacaaggaaatttctacagtcattattttaatctgattcattctcttggtgggatattccagagttaccacctacagaaattccacttttccttactgaggttttcttttttttcttttcagtccaaatattagtcattttggtagagaaggtagaaacaattaacaattgagtaattcctcaagaatcatgttaaaaggtttccaaatcatgaatgtatagttatattttgttcgctagattttaacccacatacctcacttgtatagaaattatgcttatttggatactcagtatatttcttcacataaagacaaaatctataaaatgtacacacacacagatgctatggatacatgcacacatgtgcacacacaaatatgtatacatggtttaccattattttctagatcattcagaggtcagtattaattaaaacatcatagatctatggcaaattttgggccacttctcctaagacaggaatttaaaaagccttcaattgtcataacaatgggaagaagtctgagagctggagtaagggaagttggtgctcagaaatattaactaccatttatataggatatccttatgagataatcttaaagacaaatgaggctaaaatagtaatacgagttatttagccaagttttccagcaggaagaaggaaataagcagtgaactaaaaagcatacaagatacagaggagcaggttaattgaagccattgcagcagaaattgagaagaataaacaggagttagaagatgagagcaagcaattgcaagtggagtgggctgagctggaattatggtgtagaaaatgactggttgagaaaaacccaaacaaatatttctataatgtcatgtgcataagatacctgtagatgttatcaaggtatatacataaactacctgtcattagagctaatttcttagcaaattattcataaaagtttataactttgtgaggcattacggacaccaaaactaatgatttggcatttccatgggccaatttgtctaaagaactatcttttacactttactgttttttaataagcaatacagtgctcaaaaagtcttttataccaagtccagtaggttgataacattgagtataactgagcattgctttgtgtctaccctcaggcaaatctggagattttctcaagcttctttatgaaaatggagaaacctcacaagagatgctaatggacagctgaccctgctccctgctccatcacaggttgtagagtattaattcccaagttacccagacatttagttgtgaatgtgcaaaaatggtttaggttcaaatgttttcaactactgacaagctcaagaattcagaggaggtagtactaagggaaatgtaattaatatataatatcaaaacttaagcatagcaccataacacctaatttttgatgatgtcaaatacttaaagttctccctttttattttctggtgaaaggtgcatagtatacaaacctctactaacttcttgggcttctgaataaaggaaaggactacctaatgacagtaatagcttgactgctgaagaattatgtcaattaacaaaaattgcttcataggaaaaagatgaattgtctcttcaaagttttttttaagcatgggtgaccaaaaccatcacatacttagaagaaaatattgcattgatttatacaagatatgctgtacacgttacagaagattcgtgtttaataatgcatcttgtaaaaatcttagagagctataaccttacaacatgacttaacccaaatacattgaaaaccccttggatttagacctacagggaggtggttttgctttctgtaccatagcacgcatagttgaagcaaacatattccttcaaacataatactcttacataatagaaagtgttctctgttttctggatgaaaaggcatgaggtcttttgtattagcaaactgaaattgttaactataaaaagtcaaaaatcaaaggtgctctcacgtatttataaggaccttgaatggctcagattcatcaggaaaaaaaaaaaacattcctgagagtctgatctcaagctgatgtttctttattgaatttgattctaaaccatcattttgttgaatcctctgtgctttcagaatgctgaaatgtaaaatatttttaacttatgaaagagataatttatttttattttctcctatacattttttttttctcaacatggtatttatttacatttttcttttattatactttaagttttagggtacatgtgcacattgtgcaggttagttacatatgtatacatgtgccatgctggtgcgctgcacccactaactcgtcatctagcattaggtatatctcccattgctatccctcccccctccccccaccccaccacagtccccagagtgtgatattccccttcctgtgtccatgtgatctcattgttcagttcccacctatgagtgagaatatgcggtgtttggttatttgttcttgcgatagtttactgagaatggtgatttccaatttcatccatgtccctacaaaggacatgaactcatcattttttatggctgcatagtattccatggtgtatatgtgccacattttcttaatccagtctatcattgttggacacttgggttggttccaagtctttgctattgtgaataatgccgcaataaacatatgtgtgcatgtgtctttatagcagcatgatttatagtcatttgggtatatacgcagtaatgggatggctgggtcaaatggtatttctagttctagatccctgaggaatcgccacactgacttccaccatggttgaactagtttacagtcccaccaacagtgtaaaagtgttcctatttctccatatcctctccagcacctgttgtttcctgactttttaatgattgccattctaactggtgtgatatggtatctcattgtggttttgatttgcatttctctgatggccagtgatgatgagcattttttcatgtgttttttggctgcataaatgtcttcttttgagaagtgtctgttcatgtccttcgcccactttttgatggggttgtttgtttttttcttgtaaatttgtttgagttcattgtagattctggatattagccatttgtcagatgagtaggttgcaaaaattttctcccattttgtaggttgcctgttcactctgatggtagtttcttttgctgtgcagaagctctttagtttaattagatcccatttgtcaattttgtcttttgttgccattgcttttggtgttttggacatgaagtccgtgcccatgcctatgtcctgaacggtaatgcctaggttttcttctagggtttttatggttttaggtctaacatttaaatctttaatccatcttgaattgatttttgtataaggtgtaaggaagggatcccgtttcagctttctacatacggctagccagttttcccagcaccatttattaaatagggaatcctttccccattgcttgtttttctcaggtttgtcaaagatcagatagttgtagatatgcagtgttatttctgagggctctgttctgttccattgatctatatctctgttttggtaccagtaccatgctgttttggttactgtagccttgtcttctatacatttttaagtagtaccttaaaaactagacaaatccatacagggtcaaaagaactcaactgaattctctatcactgtgaaaatagacttagttcttcattacaaaagcactacaataactacaaaaattatatctcctggagtatatatttacatatccatgcaaaaggggaatagattaaaagatgtttatgaatgtctaaaaccttaagtcagtttaagtttaacgtagtattataaatcaggtttgtgggtgatattttgtctgcttctagacttgtgagcaagttattaagttttaggttacttatatttaaaattcaaaaaggaaatgattgtgattgcattcaaagaaagagaggacattttgaagcttctttttttttactaatatcaaaacataatatcacatttgcaaaacacgttgatggcttacaaccaagtaaaatacctcaataccccacttttcaagatcnnnnnnnnnnnnnnnnnnnnnnnnnnnnnnnnnnnnnnnnnnnnnnnnnnnnnnnnnnnnnnnnnnnnnnnnnnnnnnnnnnnnnnnnnnnnnnnnnnnnnnnnnnnnnnnnnnnnnnnnnnnnnnnnnnnnnnnnnnnnnnnnnnnnnnnnnnnnnnnnnnnnnnnnnnnnnnnnnnnnnnnnnnnnnnnnnnnnnnnnnnnnnnnnnnnnnnnnnnnnnnnnnnnnnnnnnnnnnnnnnnnnnnnnnnnnnnnnnnnnnnnnnnnnnnnnnnnnnnnnnnnnnnnnnnnnnnnnnnnnnnnnnnnnnnnnnnnnnnnnnnnnnnnnnnnnnnnnnnnnnnnnnnnnnnnnnnnnnnnnnnnnnnnnnnnnnnnnnnnnnnnnnnnnnnnnnnnnnnnnnnnnnnnnnnnnnnnnnnnnnnnnnnnnnnnnnnnnnnnnnnnnnnnnnnnnnnnnnnnnnnnnnnnnnnnnnnnnnnnnnnnnnnnnnnnnnnnnnnnnnnnnnnnnnnnnnnnnnnnnnnnnnnnnnnnnnnnnnnnnnnnnnnnnnnnnnnnnnnnnnnnnnnnnnnnnnnnnnnnnnnnnnnnnnnnnnnnnnnnnnnnnnnnnnnnnnnnnnnnnnnnnnnnnnnnnnnnnnnnnnnnnnnnnnnnnnnnnnnnnnnnnnnnnnnnnnnnnnnnnnnnnnnnnnnnnnnnnnnnnnnnnnnnnnnnnnnnnnnnnnnnnnnnnnnnnnnnnnnnnnnnnnnnnnnnnnnnnnnnnnnnnnnnnnnnnnnnnnnnnnnnnnnnnnnnnnnnnnnnnnnnnnnnnnnnnnnnnnnnnnnnnnnnnnnnnnnnnnnnnnnnnnnnnnnnnnnnnnnnnnnnnnnnnnnnnnnnnnnnnnnnnnnnnnnnnnnnnnnnnnnnnnnnnnnnnnnnnnnnnnnnnnnnnnnnnnnnnnnnnnnnnnnnnnnnnnnnnnnnnnnnnnnnnnnnnnnnnnnnnnnnnnnnnnnnnnnnnnnnnnnnnnnnnnnnnnnnnnnnnnnnnnnnnnnnnnnnnnnnnnnnnnnnnnnnnnnnnnnnnnnnnnnnnnnnnnnnnnnnnnnnnnnnnnnnnnnnnnnnnnnnnnnnnnnnnnnnnnnnnnnnnnnnnnnnnnnnnnnnnnnnnnnnnnnnnnnnnnnnnnnnnnnnnnnnnnnnnnnnnnnnnnnnnnnnnnnnnnnnnnnnnnnnnnnnnnnnnnnnnnnnnnnnnnnnnnnnnnnnnnnnnnnnnnnnnnnnnnnnnnnnnnnnnnnnnnnnnnnnnnnnnnnnnnnnnnnnnnnnnnnnnnnnnnnnnnnnnnnnnnnnnnnnnnnnnnnnnnnnnnnnnnnnnnnnnnnnnnnnnnnnnnnnnnnnnnnnnnnnnnnnnnnnnnnnnnnnnnnnnnnnnnnnnnnnnnnnnnnnnnnnnnnnnnnnnnnnnnnnnnnnnnnnnnnnnnnnnnnnnnnnnnnnnnnnnnnnnnnnnnnnnnnnnnnnnnnnnnnnnnnnnnnnnnnnnnnnnnnnnnnnnnnnnnnnnnnnnnnnnnnnnnnnnnnnnnnnnnnnnnnnnnnnnnnnnnnnnnnnnnnnnnnnnnnnnnnnnnnnnnnnnnnnnnnnnnnnnnnnnnnnnnnnnnnnnnnnnnnnnnnnnnnnnnnnnnnnnnnnnnnnnnnnnnnnnnnnnnnnnnnnnnnnnnnnnnnnnnnnnnnnnnnnnnnnnnnnnnnnnnnnnnnnnnnnnnnnnnnnnnnnnnnnnnnnnnnnnnnnnnnnnnnnnnnnnnnnnnnnnnnnnnnnnnnnnnnnnnnnnnnnnnnnnnnnnnnnnnnnnnnnnnnnnnnnnnnnnnnnnnnnnnnnnnnnnnnnnnnnnnnnnnnnnnnnnnnnnnnnnnnnnnnnnnnnnnnnnnnnnnnnnnnnnnnnnnnnnnnnnnnnnnnnnnnnnnnnnnnnnnnnnnnnnnnnnnnnnnnnnnnnnnnnnnnnnnnnnnnnnnnnnnnnnnnnnnnnnnnnnnnnnnnnnnnnnnnnnnnnnnnnnnnnnnnnnnnnnnnnnnnnnnnnnnnnnnnnnnnnnnnnnnnnnnnnnnnnnnnnnnnnnnnnnnnnnnnnnnnnnnnnnnnnnnnnnnnnnnnnnnnnnnnnnnnnnnnnnnnnnnnnnnnnnnnnnnnnnnnnnnnnnnnnnnnnnnnnnnnnnnnnnnnnnnnnnnnnnnnnnnnnnnnnnnnnnnnnnnnnnnnnnnnnnnnnnnnnnnnnnnnnnnnnnnnnnnnnnnnnnnnnnnnnnnnnnnnnnnnnnnnnnnnnnnnnnnnnnnnnnnnnnnnnnnnnnnnnnnnnnnnnnnnnnnnnnnnnnnnnnnnnnnnnnnnnnnnnnnnnnnnnnnnnnnnnnnnnnnnnnnnnnnnnnnnnnnnnnnnnnnnnnnnnnnnnnnnnnnnnnnnnnnnnnnnnnnnnnnnnnnnnnnnnnnnnnnnnnnnnnnnnnnnnnnnnnnnnnnnnnnnnnnnnnnnnnnnnnnnnnnnnnnnnnnnnnnnnnnnnnnnnnnnnnnnnnnnnnnnnnnnnnnnnnnnnnnnnnnnnnnnnnnnnnnnnnnnnnnnnnnnnnnnnnnnnnnnnnnnnnnnnnnnnnnnnnnnnnnnnnnnnnnnnnnnnnnnnnnnnnnnnnnnnnnnnnnnnnnnnnnnnnnnnnnnnnnnnnnnnnnnnnnnnnnnnnnnnnnnnnnnnnnnnnnnnnnnnnnnnnnnnnnnnnnnnnnnnnnnnnnnnnnnnnnnnnnnnnnnnnnnnnnnnnnnnnnnnnnnnnnnnnnnnnnnnnnnnnnnnnnnnnnnnnnnnnnnnnnnnnnnnnnnnnnnnnnnnnnnnnnnnnnnnnnnnnnnnnnnnnnnnnnnnnnnnnnnnnnnnnnnnnnnnnnnnnnnnnnnnnnnnnnnnnnnnnnnnnnnnnnnnnnnnnnnnnnnnnnnnnnnnnnnnnnnnnnnnnnnnnnnnnnnnnnnnnnnnnnnnnnnnnnnnnnnnnnnnnnnnnnnnnnnnnnnnnnnnnnnnnnnnnnnnnnnnnnnnnnnnnnnnnnnnnnnnnnnnnnnnnnnnnnnnnnnnnnnnnnnnnnnnnnnnnnnnnnnnnnnnnnnnnnnnnnnnnnnnnnnnnnnnnnnnnnnnnnnnnnnnnnnnnnnnnnnnnnnnnnnnnnnnnnnnnnnnnnnnnnnnnnnnnnnnnnnnnnnnnnnnnnnnnnnnnnnnnnnnnnnnnnnnnnnnnnnnnnnnnnnnnnnnnnnnnnnnnnnnnnnnnnnnnnnnnnnnnnnnnnnnnnnnnnnnnnnnnnnnnnnnnnnnnnnnnnnnnnnnnnnnnnnnnnnnnnnnnnnnnnnnnnnnnnnnnnnnnnnnnnnnnnnnnnnnnnnnnnnnnnnnnnnnnnnnnnnnnnnnnnnnnnnnnnnnnnnnnnnnnnnnnnnnnnnnnnnnnnnnnnnnnnnnnnnnnnnnnnnnnnnnnnnnnnnnnnnnnnnnnnnnnnnnnnnnnnnnnnnnnnnnnnnnnnnnnnnnnnnnnnnnnnnnnnnnnnnnnnnnnnnnnnnnnnnnnnnnnnnnnnnnnnnnnnnnnnnnnnnnnnnnnnnnnnnnnnnnnnnnnnnnnnnnnnnnnnnnnnnnnnnnnnnnnnnnnnnnnnnnnnnnnnnnnnnnnnnnnnnnnnnnnnnnnnnnnnnnnnnnnnnnnnnnnnnnnnnnnnnnnnnnnnnnnnnnnnnnnnnnnnnnnnnnnnnnnnnnnnnnnnnnnnnnnnnnnnnnnnnnnnnnnnnnnnnnnnnnnnnnnnnnnnnnnnnnnnnnnnnnnnnnnnnnnnnnnnnnnnnnnnnnnnnnnnnnnnnnnnnnnnnnnnnnnnnnnnnnnnnnnnnnnnnnnnnnnnnnnnnnnnnnnnnnnnnnnnnnnnnnnnnnnnnnnnnnnnnnnnnnnnnnnnnnnnnnnnnnnnnnnnnnnnnnnnnnnnnnnnnnnnnnnnnnnnnnnnnnnnnnnnnnnnnnnnnnnnnnnnnnnnnnnnnnnnnnnnnnnnnnnnnnnnnnnnnnnnnnnnnnnnnnnnnnnnnnnnnnnnnnnnnnnnnnnnnnnnnnnnnnnnnnnnnnnnnnnnnnnnnnnnnnnnnnnnnnnnnnnnnnnnnnnnnnnnnnnnnnnnnnnnnnnnnnnnnnnnnnnnnnnnnnnnnnnnnnnnnnnnnnnnnnnnnnnnnnnnnnnnnnnnnnnnnnnnnnnnnnnnnnnnnnnnnnnnnnnnnnnnnnnnnnnnnnnnnnnnnnnnnnnnnnnnnnnnnnnnnnnnnnnnnnnnnnnnnnnnnnnnnnnnnnnnnnnnnnnnnnnnnnnnnnnnnnnnnnnnnnnnnnnnnnnnnnnnnnnnnnnnnnnnnnnnnnnnnnnnnnnnnnnnnnnnnnnnnnnnnnnnnnnnnnnnnnnnnnnnnnnnnnnnnnnnnnnnnnnnnnnnnnnnnnnnnnnnnnnnnnnnnnnnnnnnnnnnnnnnnnnnnnnnnnnnnnnnnnnnnnnnnnnnnnnnnnnnnnnnnnnnnnnnnnnnnnnnnnnnnnnnnnnnnnnnnnnnnnnnnnnnnnnnnnnnnnnnnnnnnnnnnnnnnnnnnnnnnnnnnnnnnnnnnnnnnnnnnnnnnnnnnnnnnnnnnnnnnnnnnnnnnnnnnnnnnnnnnnnnnnnnnnnnnnnnnnnnnnnnnnnnnnnnnnnnnnnnnnnnnnnnnnnnnnnnnnnnnnnnnnnnnnnnnnnnnnnnnnnnnnnnnnnnnnnnnnnnnnnnnnnnnnnnnnnnnnnnnnnnnnnnnnnnnnnnnnnnnnnnnnnnnnnnnnnnnnnnnnnnnnnnnnnnnnnnnnnnnnnnnnnnnnnnnnnnnnnnnnnnnnnnnnnnnnnnnnnnnnnnnnnnnnnnnnnnnnnnnnnnnnnnnnnnnnnnnnnnnnnnnnnnnnnnnnnnnnnnnnnnnnnnnnnnnnnnnnnnnnnnnnnnnnnnnnnnnnnnnnnnnnnnnnnnnnnnnnnnnnnnnnnnnnnnnnnnnnnnnnnnnnnnnnnnnnnnnnnnnnnnnnnnnnnnnnnnnnnnnnnnnnnnnnnnnnnnnnnnnnnnnnnnnnnnnnnnnnnnnnnnnnnnnnnnnnnnnnnnnnnnnnnnnnnnnnnnnnnnnnnnnnnnnnnnnnnnnnnnnnnnnnnnnnnnnnnnnnnnnnnnnnnnnnnnnnnnnnnnnnnnnnnnnnnnnnnnnnnnnnnnnnnnnnnnnnnnnnnnnnnnnnnnnnnnnnnnnnnnnnnnnnnnnnnnnnnnnnnnnnnnnnnnnnnnnnnnnnnnnnnnnnnnnnnnnnnnnnnnnnnnnnnnnnnnnnnnnnnnnnnnnnnnnnnnnnnnnnnnnnnnnnnnnnnnnnnnnnnnnnnnnnnnnnnnnnnnnnnnnnnnnnnnnnnnnnnnnnnnnnnnnnnnnnnnnnnnnnnnnnnnnnnnnnnnnnnnnnnnnnnnnnnnnnnnnnnnnnnnnnnnnnnnnnnnnnnnnnnnnnnnnnnnnnnnnnnnnnnnnnnnnnnnnnnnnnnnnnnnnnnnnnnnnnnnnnnnnnnnnnnnnnnnnnnnnnnnnnnnnnnnnnnnnnnnnnnnnnnnnnnnnnnnnnnnnnnnnnnnnnnnnnnnnnnnnnnnnnnnnnnnnnnnnnnnnnnnnnnnnnnnnnnnnnnnnnnnnnnnnnnnnnnnnnnnnnnnnnnnnnnnnnnnnnnnnnnnnnnnnnnnnnnnnnnnnnnnnnnnnnnnnnnnnnnnnnnnnnnnnnnnnnnnnnnnnnnnnnnnnnnnnnnnnnnnnnnnnnnnnnnnnnnnnnnnnnnnnnnnnnnnnnnnnnnnnnnnnnnnnnnnnnnnnnnnnnnnnnnnnnnnnnnnnnnnnnnnnnnnnnnnnnnnnnnnnnnnnnnnnnnnnnnnnnnnnnnnnnnnnnnnnnnnnnnnnnnnnnnnnnnnnnnnnnnnnnnnnnnnnnnnnnnnnnnnnnnnnnnnnnnnnnnnnnnnnnnnnnnnnnnnnnnnnnnnnnnnnnnnnnnnnnnnnnnnnnnnnnnnnnnnnnnnnnnnnnnnnnnnnnnnnnnnnnnnnnnnnnnnnnnnnnnnnnnnnnnnnnnnnnnnnnnnnnnnnnnnnnnnnnnnnnnnnnnnnnnnnnnnnnnnnnnnnnnnnnnnnnnnnnnnnnnnnnnnnnnnnnnnnnnnnnnnnnnnnnnnnnnnnnnnnnnnnnnnnnnnnnnnnnnnnnnnnnnnnnnnnnnnnnnnnnnnnnnnnnnnnnnnnnnnnnnnnnnnnnnnnnnnnnnnnnnnnnnnnnnnnnnnnnnnnnnnnnnnnnnnnnnnnnnnnnnnnnnnnnnnnnnnnnnnnnnnnnnnnnnnnnnnnnnnnnnnnnnnnnnnnnnnnnnnnnnnnnnnnnnnnnnnnnnnnnnnnnnnnnnnnnnnnnnnnnnnnnnnnnnnnnnnnnnnnnnnnnnnnnnnnnnnnnnnnnnnnnnnnnnnnnnnnnnnnnnnnnnnnnnnnnnnnnnnnnnnnnnnnnnnnnnnnnnnnnnnnnnnnnnnnnnnnnnnnnnnnnnnnnnnnnnnnnnnnnnnnnnnnnnnnnnnnnnnnnnnnnnnnnnnnnnnnnnnnnnnnnnnnnnnnnnnnnnnnnnnnnnnnnnnnnnnnnnnnnnnnnnnnnnnnnnnnnnnnnnnnnnnnnnnnnnnnnnnnnnnnnnnnnnnnnnnnnnnnnnnnnnnnnnnnnnnnnnnnnnnnnnnnnnnnnnnnnnnnnnnnnnnnnnnnnnnnnnnnnnnnnnnnnnnnnnnnnnnnnnnnnnnnnnnnnnnnnnnnnnnnnnnnnnnnnnnnnnnnnnnnnnnnnnnnnnnnnnnnnnnnnnnnnnnnnnnnnnnnnnnnnnnnnnnnnnnnnnnnnnnnnnnnnnnnnnnnnnnnnnnnnnnnnnnnnnnnnnnnnnnnnnnnnnnnnnnnnnnnnnnnnnnnnnnnnnnnnnnnnnnnnnnnnnnnnnnnnnnnnnnnnnnnnnnnnnnnnnnnnnnnnnnnnnnnnnnnnnnnnnnnnnnnnnnnnnnnnnnnnnnnnnnnnnnnnnnnnnnnnnnnnnnnnnnnnnnnnnnnnnnnnnnnnnnnnnnnnnnnnnnnnnnnnnnnnnnnnnnnnnnnnnnnnnnnnnnnnnnnnnnnnnnnnnnnnnnnnnnnnnnnnnnnnnnnnnnnnnnnnnnnnnnnnnnnnnnnnnnnnnnnnnnnnnnnnnnnnnnnnnnnnnnnnnnnnnnnnnnnnnnnnnnnnnnnnnnnnnnnnnnnnnnnnnnnnnnnnnnnnnnnnnnnnnnnnnnnnnnnnnnnnnnnnnnnnnnnnnnnnnnnnnnnnnnnnnnnnnnnnnnnnnnnnnnnnnnnnnnnnnnnnnnnnnnnnnnnnnnnnnnnnnnnnnnnnnnnnnnnnnnnnnnnnnnnnnnnnnnnnnnnnnnnnnnnnnnnnnnnnnnnnnnnnnnnnnnnnnnnnnnnnnnnnnnnnnnnnnnnnnnnnnnnnnnnnnnnnnnnnnnnnnnnnnnnnnnnnnnnnnnnnnnnnnnnnnnnnnnnnnnnnnnnnnnnnnnnnnnnnnnnnnnnnnnnnnnnnnnnnnnnnnnnnnnnnnnnnnnnnnnnnnnnnnnnnnnnnnnnnnnnnnnnnnnnnnnnnnnnnnnnnnnnnnnnnnnnnnnnnnnnnnnnnnnnnnnnnnnnnnnnnnnnnnnnnnnnnnnnnnnnnnnnnnnnnnnnnnnnnnnnnnnnnnnnnnnnnnnnnnnnnnnnnnnnnnnnnnnnnnnnnnnnnnnnnnnnnnnnnnnnnnnnnnnnnnnnnnnnnnnnnnnnnnnnnnnnnnnnnnnnnnnnnnnnnnnnnnnnnnnnnnnnnnnnnnnnnnnnnnnnnnnnnnnnnnnnnnnnnnnnnnnnnnnnnnnnnnnnnnnnnnnnnnnnnnnnnnnnnnnnnnnnnnnnnnnnnnnnnnnnnnnnnnnnnnnnnnnnnnnnnnnnnnnnnnnnnnnnnnnnnnnnnnnnnnnnnnnnnnnnnnnnnnnnnnnnnnnnnnnnnnnnnnnnnnnnnnnnnnnnnnnnnnnnnnnnnnnnnnnnnnnnnnnnnnnnnnnnnnnnnnnnnnnnnnnnnnnnnnnnnnnnnnnnnnnnnnnnnnnnnnnnnnnnnnnnnnnnnnnnnnnnnnnnnnnnnnnnnnnnnnnnnnnnnnnnnnnnnnnnnnnnnnnnnnnnnnnnnnnnnnnnnnnnnnnnnnnnnnnnnnnnnnnnnnnnnnnnnnnnnnnnnnnnnnnnnnnnnnnnnnnnnnnnnnnnnnnnnnnnnnnnnnnnnnnnnnnnnnnnnnnnnnnnnnnnnnnnnnnnnnnnnnnnnnnnnnnnnnnnnnnnnnnnnnnnnnnnnnnnnnnnnnnnnnnnnnnnnnnnnnnnnnnnnnnnnnnnnnnnnnnnnnnnnnnnnnnnnnnnnnnnnnnnnnnnnnnnnnnnnnnnnnnnnnnnnnnnnnnnnnnnnnnnnnnnnnnnnnnnnnnnnnnnnnnnnnnnnnnnnnnnnnnnnnnnnnnnnnnnnnnnnnnnnnnnnnnnnnnnnnnnnnnnnnnnnnnnnnnnnnnnnnnnnnnnnnnnnnnnnnnnnnnnnnnnnnnnnnnnnnnnnnnnnnnnnnnnnnnnnnnnnnnnnnnnnnnnnnnnnnnnnnnnnnnnnnnnnnnnnnnnnnnnnnnnnnnnnnnnnnnnnnnnnnnnnnnnnnnnnnnnnnnnnnnnnnnnnnnnnnnnnnnnnnnnnnnnnnnnnnnnnnnnnnnnnnnnnnnnnnnnnnnnnnnnnnnnnnnnnnnnnnnnnnnnnnnnnnnnnnnnnnnnnnnnnnnnnnnnnnnnnnnnnnnnnnnnnnnnnnnnnnnnnnnnnnnnnnnnnnnnnnnnnnnnnnnnnnnnnnnnnnnnnnnnnnnnnnnnnnnnnnnnnnnnnnnnnnnnnnnnnnnnnnnnnnnnnnnnnnnnnnnnnnnnnnnnnnnnnnnnnnnnnnnnnnnnnnnnnnnnnnnnnnnnnnnnnnnnnnnnnnnnnnnnnnnnnnnnnnnnnnnnnnnnnnnnnnnnnnnnnnnnnnnnnnnnnnnnnnnnnnnnnnnnnnnnnnnnnnnnnnnnnnnnnnnnnnnnnnnnnnnnnnnnnnnnnnnnnnnnnnnnnnnnnnnnnnnnnnnnnnnnnnnnnnnnnnnnnnnnnnnnnnnnnnnnnnnnnnnnnnnnnnnnnnnnnnnnnnnnnnnnnnnnnnnnnnnnnnnnnnnnnnnnnnnnnnnnnnnnnnnnnnnnnnnnnnnnnnnnnnnnnnnnnnnnnnnnnnnnnnnnnnnnnnnnnnnnnnnnnnnnnnnnnnnnnnnnnnnnnnnnnnnnnnnnnnnnnnnnnnnnnnnnnnnnnnnnnnnnnnnnnnnnnnnnnnnnnnnnnnnnnnnnnnnnnnnnnnnnnnnnnnnnnnnnnnnnnnnnnnnnnnnnnnnnnnnnnnnnnnnnnnnnnnnnnnnnnnnnnnnnnnnnnnnnnnnnnnnnnnnnnnnnnnnnnnnnnnnnnnnnnnnnnnnnnnnnnnnnnnnnnnnnnnnnnnnnnnnnnnnnnnnnnnnnnnnnnnnnnnnnnnnnnnnnnnnnnnnnnnnnnnnnnnnnnnnnnnnnnnnnnnnnnnnnnnnnnnnnnnnnnnnnnnnnnnnnnnnnnnnnnnnnnnnnnnnnnnnnnnnnnnnnnnnnnnnnnnnnnnnnnnnnnnnnnnnnnnnnnnnnnnnnnnnnnnnnnnnnnnnnnnnnnnnnnnnnnnnnnnnnnnnnnnnnnnnnnnnnnnnnnnnnnnnnnnnnnnnnnnnnnnnnnnnnnnnnnnnnnnnnnnnnnnnnnnnnnnnnnnnnnnnnnnnnnnnnnnnnnnnnnnnnnnnnnnnnnnnnnnnnnnnnnnnnnnnnnnnnnnnnnnnnnnnnnnnnnnnnnnnnnnnnnnnnnnnnnnnnnnnnnnnnnnnnnnnnnnnnnnnnnnnnnnnnnnnnnnnnnnnnnnnnnnnnnnnnnnnnnnnnnnnnnnnnnnnnnnnnnnnnnnnnnnnnnnnnnnnnnnnnnnnnnnnnnnnnnnnnnnnnnnnnnnnnnnnnnnnnnnnnnnnnnnnnnnnnnnnnnnnnnnnnnnnnnnnnnnnnnnnnnnnnnnnnnnnnnnnnnnnnnnnnnnnnnnnnnnnnnnnnnnnnnnnnnnnnnnnnnnnnnnnnnnnnnnnnnnnnnnnnnnnnnnnnnnnnnnnnnnnnnnnnnnnnnnnnnnnnnnnnnnnnnnnnnnnnnnnnnnnnnnnnnnnnnnnnnnnnnnnnnnnnnnnnnnnnnnnnnnnnnnnnnnnnnnnnnnnnnnnnnnnnnnnnnnnnnnnnnnnnnnnnnnnnnnnnnnnnnnnnnnnnnnnnnnnnnnnnnnnnnnnnnnnnnnnnnnnnnnnnnnnnnnnnnnnnnnnnnnnnnnnnnnnnnnnnnnnnnnnnnnnnnnnnnnnnnnnnnnnnnnnnnnnnnnnnnnnnnnnnnnnnnnnnnnnnnnnnnnnnnnnnnnnnnnnnnnnnnnnnnnnnnnnnnnnnnnnnnnnnnnnnnnnnnnnnnnnnnnnnnnnnnnnnnnnnnnnnnnnnnnnnnnnnnnnnnnnnnnnnnnnnnnnnnnnnnnnnnnnnnnnnnnnnnnnnnnnnnnnnnnnnnnnnnnnnnnnnnnnnnnnnnnnnnnnnnnnnnnnnnnnnnnnnnnnnnnnnnnnnnnnnnnnnnnnnnnnnnnnnnnnnnnnnnnnnnnnnnnnnnnnnnnnnnnnnnnnnnnnnnnnnnnnnnnnnnnnnnnnnnnnnnnnnnnnnnnnnnnnnnnnnnnnnnnnnnnnnnnnnnnnnnnnnnnnnnnnnnnnnnnnnnnnnnnnnnnnnnnnnnnnnnnnnnnnnnnnnnnnnnnnnnnnnnnnnnnnnnnnnnnnnnnnnnnnnnnnnnnnnnnnnnnnnnnnnnnnnnnnnnnnnnnnnnnnnnnnnnnnnnnnnnnnnnnnnnnnnnnnnnnnnnnnnnnnnnnnnnnnnnnnnnnnnnnnnnnnnnnnnnnnnnnnnnnnnnnnnnnnnnnnnnnnnnnnnnnnnnnnnnnnnnnnnnnnnnnnnnnnnnnnnnnnnnnnnnnnnnnnnnnnnnnnnnnnnnnnnnnnnnnnnnnnnnnnnnnnnnnnnnnnnnnnnnnnnnnnnnnnnnnnnnnnnnnnnnnnnnnnnnnnnnnnnnnnnnnnnnnnnnnnnnnnnnnnnnnnnnnnnnnnnnnnnnnnnnnnnnnnnnnnnnnnnnnnnnnnnnnnnnnnnnnnnnnnnnnnnnnnnnnnnnnnnnnnnnnnnnnnnnnnnnnnnnnnnnnnnnnnnnnnnnnnnnnnnnnnnnnnnnnnnnnnnnnnnnnnnnnnnnnnnnnnnnnnnnnnnnnnnnnnnnnnnnnnnnnnnnnnnnnnnnnnnnnnnnnnnnnnnnnnnnnnnnnnnnnnnnnnnnnnnnnnnnnnnnnnnnnnnnnnnnnnnnnnnnnnnnnnnnnnnnnnnnnnnnnnnnnnnnnnnnnnnnnnnnnnnnnnnnnnnnnnnnnnnnnnnnnnnnnnnnnnnnnnnnnnnnnnnnnnnnnnnnnnnnnnnnnnnnnnnnnnnnnnnnnnnnnnnnnnnnnnnnnnnnnnnnnnnnnnnnnnnnnnnnnnnnnnnnnnnnnnnnnnnnnnnnnnnnnnnnnnnnnnnnnnnnnnnnnnnnnnnnnnnnnnnnnnnnnnnnnnnnnnnnnnnnnnnnnnnnnnnnnnnnnnnnnnnnnnnnnnnnnnnnnnnnnnnnnnnnnnnnnnnnnnnnnnnnnnnnnnnnnnnnnnnnnnnnnnnnnnnnnnnnnnnnnnnnnnnnnnnnnnnnnnnnnnnnnnnnnnnnnnnnnnnnnnnnnnnnnnnnnnnnnnnnnnnnnnnnnnnnnnnnnnnnnnnnnnnnnnnnnnnnnnnnnnnnnnnnnnnnnnnnnnnnnnnnnnnnnnnnnnnnnnnnnnnnnnnnnnnnnnnnnnnnnnnnnnnnnnnnnnnnnnnnnnnnnnnnnnnnnnnnnnnnnnnnnnnnnnnnnnnnnnnnnnnnnnnnnnnnnnnnnnnnnnnnnnnnnnnnnnnnnnnnnnnnnnnnnnnnnnnnnnnnnnnnnnnnnnnnnnnnnnnnnnnnnnnnnnnnnnnnnnnnnnnnnnnnnnnnnnnnnnnnnnnnnnnnnnnnnnnnnnnnnnnnnnnnnnnnnnnnnnnnnnnnnnnnnnnnnnnnnnnnnnnnnnnnnnnnnnnnnnnnnnnnnnnnnnnnnnnnnnnnnnnnnnnnnnnnnnnnnnnnnnnnnnnnnnnnnnnnnnnnnnnnnnnnnnnnnnnnnnnnnnnnnnnnnnnnnnnnnnnnnnnnnnnnnnnnnnnnnnnnnnnnnnnnnnnnnnnnnnnnnnnnnnnnnnnnnnnnnnnnnnnnnnnnnnnnnnnnnnnnnnnnnnnnnnnnnnnnnnnnnnnnnnnnnnnnnnnnnnnnnnnnnnnnnnnnnnnnnnnnnnnnnnnnnnnnnnnnnnnnnnnnnnnnnnnnnnnnnnnnnnnnnnnnnnnnnnnnnnnnnnnnnnnnnnnnnnnnnnnnnnnnnnnnnnnnnnnnnnnnnnnnnnnnnnnnnnnnnnnnnnnnnnnnnnnnnnnnnnnnnnnnnnnnnnnnnnnnnnnnnnnnnnnnnnnnnnnnnnnnnnnnnnnnnnnnnnnnnnnnnnnnnnnnnnnnnnnnnnnnnnnnnnnnnnnnnnnnnnnnnnnnnnnnnnnnnnnnnnnnnnnnnnnnnnnnnnnnnnnnnnnnnnnnnnnnnnnnnnnnnnnnnnnnnnnnnnnnnnnnnnnnnnnnnnnnnnnnnnnnnnnnnnnnnnnnnnnnnnnnnnnnnnnnnnnnnnnnnnnnnnnnnnnnnnnnnnnnnnnnnnnnnnnnnnnnnnnnnnnnnnnnnnnnnnnnnnnnnnnnnnnnnnnnnnnnnnnnnnnnnnnnnnnnnnnnnnnnnnnnnnnnnnnnnnnnnnnnnnnnnnnnnnnnnnnnnnnnnnnnnnnnnnnnnnnnnnnnnnnnnnnnnnnnnnnnnnnnnnnnnnnnnnnnnnnnnnnnnnnnnnnnnnnnnnnnnnnnnnnnnnnnnnnnnnnnnnnnnnnnnnnnnnnnnnnnnnnnnnnnnnnnnnnnnnnnnnnnnnnnnnnnnnnnnnnnnnnnnnnnnnnnnnnnnnnnnnnnnnnnnnnnnnnnnnnnnnnnnnnnnnnnnnnnnnnnnnnnnnnnnnnnnnnnnnnnnnnnnnnnnnnnnnnnnnnnnnnnnnnnnnnnnnnnnnnnnnnnnnnnnnnnnnnnnnnnnnnnnnnnnnnnnnnnnnnnnnnnnnnnnnnnnnnnnnnnnnnnnnnnnnnnnnnnnnnnnnnnnnnnnnnnnnnnnnnnnnnnnnnnnnnnnnnnnnnnnnnnnnnnnnnnnnnnnnnnnnnnnnnnnnnnnnnnnnnnnnnnnnnnnnnnnnnnnnnnnnnnnnnnnnnnnnnnnnnnnnnnnnnnnnnnnnnnnnnnnnnnnnnnnnnnnnnnnnnnnnnnnnnnnnnnnnnnnnnnnnnnnnnnnnnnnnnnnnnnnnnnnnnnnnnnnnnnnnnnnnnnnnnnnnnnnnnnnnnnnnnnnnnnnnnnnnnnnnnnnnnnnnnnnnnnnnnnnnnnnnnnnnnnnnnnnnnnnnnnnnnnnnnnnnnnnnnnnnnnnnnnnnnnnnnnnnnnnnnnnnnnnnnnnnnnnnnnnnnnnnnnnnnnnnnnnnnnnnnnnnnnnnnnnnnnnnnnnnnnnnnnnnnnnnnnnnnnnnnnnnnnnnnnnnnnnnnnnnnnnnnnnnnnnnnnnnnnnnnnnnnnnnnnnnnnnnnnnnnnnnnnnnnnnnnnnnnnnnnnnnnnnnnnnnnnnnnnnnnnnnnnnnnnnnnnnnnnnnnnnnnnnnnnnnnnnnnnnnnnnnnnnnnnnnnnnnnnnnnnnnnnnnnnnnnnnnnnnnnnnnnnnnnnnnnnnnnnnnnnnnnnnnnnnnnnnnnnnnnnnnnnnnnnnnnnnnnnnnnnnnnnnnnnnnnnnnnnnnnnnnnnnnnnnnnnnnnnnnnnnnnnnnnnnnnnnnnnnnnnnnnnnnnnnnnnnnnnnnnnnnnnnnnnnnnnnnnnnnnnnnnnnnnnnnnnnnnnnnnnnnnnnnnnnnnnnnnnnnnnnnnnnnnnnnnnnnnnnnnnnnnnnnnnnnnnnnnnnnnnnnnnnnnnnnnnnnnnnnnnnnnnnnnnnnnnnnnnnnnnnnnnnnnnnnnnnnnnnnnnnnnnnnnnnnnnnnnnnnnnnnnnnnnnnnnnnnnnnnnnnnnnnnnnnnnnnnnnnnnnnnnnnnnnnnnnnnnnnnnnnnnnnnnnnnnnnnnnnnnnnnnnnnnnnnnnnnnnnnnnnnnnnnnnnnnnnnnnnnnnnnnnnnnnnnnnnnnnnnnnnnnnnnnnnnnnnnnnnnnnnnnnnnnnnnnnnnnnnnnnnnnnnnnnnnnnnnnnnnnnnnnnnnnnnnnnnnnnnnnnnnnnnnnnnnnnnnnnnnnnnnnnnnnnnnnnnnnnnnnnnnnnnnnnnnnnnnnnnnnnnnnnnnnnnnnnnnnnnnnnnnnnnnnnnnnnnnnnnnnnnnnnnnnnnnnnnnnnnnnnnnnnnnnnnnnnnnnnnnnnnnnnnnnnnnnnnnnnnnnnnnnnnnnnnnnnnnnnnnnnnnnnnnnnnnnnnnnnnnnnnnnnnnnnnnnnnnnnnnnnnnnnnnnnnnnnnnnnnnnnnnnnnnnnnnnnnnnnnnnnnnnnnnnnnnnnnnnnnnnnnnnnnnnnnnnnnnnnnnnnnnnnnnnnnnnnnnnnnnnnnnnnnnnnnnnnnnnnnnnnnnnnnnnnnnnnnnnnnnnnnnnnnnnnnnnnnnnnnnnnnnnnnnnnnnnnnnnnnnnnnnnnnnnnnnnnnnnnnnnnnnnnnnnnnnnnnnnnnnnnnnnnnnnnnnnnnnnnnnnnnnnnnnnnnnnnnnnnnnnnnnnnnnnnnnnnnnnnnnnnnnnnnnnnnnnnnnnnnnnnnnnnnnnnnnnnnnnnnnnnnnnnnnnnnnnnnnnnnnnnnnnnnnnnnnnnnnnnnnnnnnnnnnnnnnnnnnnnnnnnnnnnnnnnnnnnnnnnnnnnnnnnnnnnnnnnnnnnnnnnnnnnnnnnnnnnnnnnnnnnnnnnnnnnnnnnnnnnnnnnnnnnnnnnnnnnnnnnnnnnnnnnnnnnnnnnnnnnnnnnnnnnnnnnnnnnnnnnnnnnnnnnnnnnnnnnnnnnnnnnnnnnnnnnnnnnnnnnnnnnnnnnnnnnnnnnnnnnnnnnnnnnnnnnnnnnnnnnnnnnnnnnnnnnnnnnnnnnnnnnnnnnnnnnnnnnnnnnnnnnnnnnnnnnnnnnnnnnnnnnnnnnnnnnnnnnnnnnnnnnnnnnnnnnnnnnnnnnnnnnnnnnnnnnnnnnnnnnnnnnnnnnnnnnnnnnnnnnnnnnnnnnnnnnnnnnnnnnnnnnnnnnnnnnnnnnnnnnnnnnnnnnnnnnnnnnnnnnnnnnnnnnnnnnnnnnnnnnnnnnnnnnnnnnnnnnnnnnnnnnnnnnnnnnnnnnnnnnnnnnnnnnnnnnnnnnnnnnnnnnnnnnnnnnnnnnnnnnnnnnnnnnnnnnnnnnnnnnnnnnnnnnnnnnnnnnnnnnnnnnnnnnnnnnnnnnnnnnnnnnnnnnnnnnnnnnnnnnnnnnnnnnnnnnnnnnnnnnnnnnnnnnnnnnnnnnnnnnnnnnnnnnnnnnnnnnnnnnnnnnnnnnnnnnnnnnnnnnnnnnnnnnnnnnnnnnnnnnnnnnnnnnnnnnnnnnnnnnnnnnnnnnnnnnnnnnnnnnnnnnnnnnnnnnnnnnnnnnnnnnnnnnnnnnnnnnnnnnnnnnnnnnnnnnnnnnnnnnnnnnnnnnnnnnnnnnnnnnnnnnnnnnnnnnnnnnnnnnnnnnnnnnnnnnnnnnnnnnnnnnnnnnnnnnnnnnnnnnnnnnnnnnnnnnnnnnnnnnnnnnnnnnnnnnnnnnnnnnnnnnnnnnnnnnnnnnnnnnnnnnnnnnnnnnnnnnnnnnnnnnnnnnnnnnnnnnnnnnnnnnnnnnnnnnnnnnnnnnnnnnnnnnnnnnnnnnnnnnnnnnnnnnnnnnnnnnnnnnnnnnnnnnnnnnnnnnnnnnnnnnnnnnnnnnnnnnnnnnnnnnnnnnnnnnnnnnnnnnnnnnnnnnnnnnnnnnnnnnnnnnnnnnnnnnnnnnnnnnnnnnnnnnnnnnnnnnnnnnnnnnnnnnnnnnnnnnnnnnnnnnnnnnnnnnnnnnnnnnnnnnnnnnnnnnnnnnnnnnnnnnnnnnnnnnnnnnnnnnnnnnnnnnnnnnnnnnnnnnnnnnnnnnnnnnnnnnnnnnnnnnnnnnnnnnnnnnnnnnnnnnnnnnnnnnnnnnnnnnnnnnnnnnnnnnnnnnnnnnnnnnnnnnnnnnnnnnnnnnnnnnnnnnnnnnnnnnnnnnnnnnnnnnnnnnnnnnnnnnnnnnnnnnnnnnnnnnnnnnnnnnnnnnnnnnnnnnnnnnnnnnnnnnnnnnnnnnnnnnnnnnnnnnnnnnnnnnnnnnnnnnnnnnnnnnnnnnnnnnnnnnnnnnnnnnnnnnnnnnnnnnnnnnnnnnnnnnnnnnnnnnnnnnnnnnnnnnnnnnnnnnnnnnnnnnnnnnnnnnnnnnnnnnnnnnnnnnnnnnnnnnnnnnnnnnnnnnnnnnnnnnnnnnnnnnnnnnnnnnnnnnnnnnnnnnnnnnnnnnnnnnnnnnnnnnnnnnnnnnnnnnnnnnnnnnnnnnnnnnnnnnnnnnnnnnnnnnnnnnnnnnnnnnnnnnnnnnnnnnnnnnnnnnnnnnnnnnnnnnnnnnnnnnnnnnnnnnnnnnnnnnnnnnnnnnnnnnnnnnnnnnnnnnnnnnnnnnnnnnnnnnnnnnnnnnnnnnnnnnnnnnnnnnnnnnnnnnnnnnnnnnnnnnnnnnnnnnnnnnnnnnnnnnnnnnnnnnnnnnnnnnnnnnnnnnnnnnnnnnnnnnnnnnnnnnnnnnnnnnnnnnnnnnnnnnnnnnnnnnnnnnnnnnnnnnnnnnnnnnnnnnnnnnnnnnnnnnnnnnnnnnnnnnnnnnnnnnnnnnnnnnnnnnnnnnnnnnnnnnnnnnnnnnnnnnnnnnnnnnnnnnnnnnnnnnnnnnnnnnnnnnnnnnnnnnnnnnnnnnnnnnnnnnnnnnnnnnnnnnnnnnnnnnnnnnnnnnnnnnnnnnnnnnnnnnnnnnnnnnnnnnnnnnnnnnnnnnnnnnnnnnnnnnnnnnnnnnnnnnnnnnnnnnnnnnnnnnnnnnnnnnnnnnnnnnnnnnnnnnnnnnnnnnnnnnnnnnnnnnnnnnnnnnnnnnnnnnnnnnnnnnnnnnnnnnnnnnnnnnnnnnnnnnnnnnnnnnnnnnnnnnnnnnnnnnnnnnnnnnnnnnnnnnnnnnnnnnnnnnnnnnnnnnnnnnnnnnnnnnnnnnnnnnnnnnnnnnnnnnnnnnnnnnnnnnnnnnnnnnnnnnnnnnnnnnnnnnnnnnnnnnnnnnnnnnnnnnnnnnnnnnnnnnnnnnnnnnnnnnnnnnnnnnnnnnnnnnnnnnnnnnnnnnnnnnnnnnnnnnnnnnnnnnnnnnnnnnnnnnnnnnnnnnnnnnnnnnnnnnnnnnnnnnnnnnnnnnnnnnnnnnnnnnnnnnnnnnnnnnnnnnnnnnnnnnnnnnnnnnnnnnnnnnnnnnnnnnnnnnnnnnnnnnnnnnnnnnnnnnnnnnnnnnnnnnnnnnnnnnnnnnnnnnnnnnnnnnnnnnnnnnnnnnnnnnnnnnnnnnnnnnnnnnnnnnnnnnnnnnnnnnnnnnnnnnnnnnnnnnnnnnnnnnnnnnnnnnnnnnnnnnnnnnnnnnnnnnnnnnnnnnnnnnnnnnnnnnnnnnnnnnnnnnnnnnnnnnnnnnnnnnnnnnnnnnnnnnnnnnnnnnnnnnnnnnnnnnnnnnnnnnnnnnnnnnnnnnnnnnnnnnnnnnnnnnnnnnnnnnnnnnnnnnnnnnnnnnnnnnnnnnnnnnnnnnnnnnnnnnnnnnnnnnnnnnnnnnnnnnnnnnnnnnnnnnnnnnnnnnnnnnnnnnnnnnnnnnnnnnnnnnnnnnnnnnnnnnnnnnnnnnnnnnnnnnnnnnnnnnnnnnnnnnnnnnnnnnnnnnnnnnnnnnnnnnnnnnnnnnnnnnnnnnnnnnnnnnnnnnnnnnnnnnnnnnnnnnnnnnnnnnnnnnnnnnnnnnnnnnnnnnnnnnnnnnnnnnnnnnnnnnnnnnnnnnnnnnnnnnnnnnnnnnnnnnnnnnnnnnnnnnnnnnnnnnnnnnnnnnnnnnnnnnnnnnnnnnnnnnnnnnnnnnnnnnnnnnnnnnnnnnnnnnnnnnnnnnnnnnnnnnnnnnnnnnnnnnnnnnnnnnnnnnnnnnnnnnnnnnnnnnnnnnnnnnnnnnnnnnnnnnnnnnnnnnnnnnnnnnnnnnnnnnnnnnnnnnnnnnnnnnnnnnnnnnnnnnnnnnnnnnnnnnnnnnnnnnnnnnnnnnnnnnnnnnnnnnnnnnnnnnnnnnnnnnnnnnnnnnnnnnnnnnnnnnnnnnnnnnnnnnnnnnnnnnnnnnnnnnnnnnnnnnnnnnnnnnnnnnnnnnnnnnnnnnnnnnnnnnnnnnnnnnnnnnnnnnnnnnnnnnnnnnnnnnnnnnnnnnnnnnnnnnnnnnnnnnnnnnnnnnnnnnnnnnnnnnnnnnnnnnnnnnnnnnnnnnnnnnnnnnnnnnnnnnnnnnnnnnnnnnnnnnnnnnnnnnnnnnnnnnnnnnnnnnnnnnnnnnnnnnnnnnnnnnnnnnnnnnnnnnnnnnnnnnnnnnnnnnnnnnnnnnnnnnnnnnnnnnnnnnnnnnnnnnnnnnnnnnnnnnnnnnnnnnnnnnnnnnnnnnnnnnnnnnnnnnnnnnnnnnnnnnnnnnnnnnnnnnnnnnnnnnnnnnnnnnnnnnnnnnnnnnnnnnnnnnnnnnnnnnnnnnnnnnnnnnnnnnnnnnnnnnnnnnnnnnnnnnnnnnnnnnnnnnnnnnnnnnnnnnnnnnnnnnnnnnnnnnnnnnnnnnnnnnnnnnnnnnnnnnnnnnnnnnnnnnnnnnnnnnnnnnnnnnnnnnnnnnnnnnnnnnnnnnnnnnnnnnnnnnnnnnnnnnnnnnnnnnnnnnnnnnnnnnnnnnnnnnnnnnnnnnnnnnnnnnnnnnnnnnnnnnnnnnnnnnnnnnnnnnnnnnnnnnnnnnnnnnnnnnnnnnnnnnnnnnnnnnnnnnnnnnnnnnnnnnnnnnnnnnnnnnnnnnnnnnnnnnnnnnnnnnnnnnnnnnnnnnnnnnnnnnnnnnnnnnnnnnnnnnnnnnnnnnnnnnnnnnnnnnnnnnnnnnnnnnnnnnnnnnnnnnnnnnnnnnnnnnnnnnnnnnnnnnnnnnnnnnnnnnnnnnnnnnnnnnnnnnnnnnnnnnnnnnnnnnnnnnnnnnnnnnnnnnnnnnnnnnnnnnnnnnnnnnnnnnnnnnnnnnnnnnnnnnnnnnnnnnnnnnnnnnnnnnnnnnnnnnnnnnnnnnnnnnnnnnnnnnnnnnnnnnnnnnnnnnnnnnnnnnnnnnnnnnnnnnnnnnnnnnnnnnnnnnnnnnnnnnnnnnnnnnnnnnnnnnnnnnnnnnnnnnnnnnnnnnnnnnnnnnnnnnnnnnnnnnnnnnnnnnnnnnnnnnnnnnnnnnnnnnnnnnnnnnnnnnnnnnnnnnnnnnnnnnnnnnnnnnnnnnnnnnnnnnnnnnnnnnnnnnnnnnnnnnnnnnnnnnnnnnnnnnnnnnnnnnnnnnnnnnnnnnnnnnnnnnnnnnnnnnnnnnnnnnnnnnnnnnnnnnnnnnnnnnnnnnnnnnnnnnnnnnnnnnnnnnnnnnnnnnnnnnnnnnnnnnnnnnnnnnnnnnnnnnnnnnnnnnnnnnnnnnnnnnnnnnnnnnnnnnnnnnnnnnnnnnnnnnnnnnnnnnnnnnnnnnnnnnnnnnnnnnnnnnnnnnnnnnnnnnnnnnnnnnnnnnnnnnnnnnnnnnnnnnnnnnnnnnnnnnnnnnnnnnnnnnnnnnnnnnnnnnnnnnnnnnnnnnnnnnnnnnnnnnnnnnnnnnnnnnnnnnnnnnnnnnnnnnnnnnnnnnnnnnnnnnnnnnnnnnnnnnnnnnnnnnnnnnnnnnnnnnnnnnnnnnnnnnnnnnnnnnnnnnnnnnnnnnnnnnnnnnnnnnnnnnnnnnnnnnnnnnnnnnnnnnnnnnnnnnnnnnnnnnnnnnnnnnnnnnnnnnnnnnnnnnnnnnnnnnnnnnnnnnnnnnnnnnnnnnnnnnnnnnnnnnnnnnnnnnnnnnnnnnnnnnnnnnnnnnnnnnnnnnnnnnnnnnnnnnnnnnnnnnnnnnnnnnnnnnnnnnnnnnnnnnnnnnnnnnnnnnnnnnnnnnnnnnnnnnnnnnnnnnnnnnnnnnnnnnnnnnnnnnnnnnnnnnnnnnnnnnnnnnnnnnnnnnnnnnnnnnnnnnnnnnnnnnnnnnnnnnnnnnnnnnnnnnnnnnnnnnnnnnnnnnnnnnnnnnnnnnnnnnnnnnnnnnnnnnnnnnnnnnnnnnnnnnnnnnnnnnnnnnnnnnnnnnnnnnnnnnnnnnnnnnnnnnnnnnnnnnnnnnnnnnnnnnnnnnnnnnnnnnnnnnnnnnnnnnnnnnnnnnnnnnnnnnnnnnnnnnnnnnnnnnnnnnnnnnnnnnnnnnnnnnnnnnnnnnnnnnnnnnnnnnnnnnnnnnnnnnnnnnnnnnnnnnnnnnnnnnnnnnnnnnnnnnnnnnnnnnnnnnnnnnnnnnnnnnnnnnnnnnnnnnnnnnnnnnnnnnnnnnnnnnnnnnnnnnnnnnnnnnnnnnnnnnnnnnnnnnnnnnnnnnnnnnnnnnnnnnnnnnnnnnnnnnnnnnnnnnnnnnnnnnnnnnnnnnnnnnnnnnnnnnnnnnnnnnnnnnnnnnnnnnnnnnnnnnnnnnnnnnnnnnnnnnnnnnnnnnnnnnnnnnnnnnnnnnnnnnnnnnnnnnnnnnnnnnnnnnnnnnnnnnnnnnnnnnnnnnnnnnnnnnnnnnnnnnnnnnnnnnnnnnnnnnnnnnnnnnnnnnnnnnnnnnnnnnnnnnnnnnnnnnnnnnnnnnnnnnnnnnnnnnnnnnnnnnnnnnnnnnnnnnnnnnnnnnnnnnnnnnnnnnnnnnnnnnnnnnnnnnnnnnnnnnnnnnnnnnnnnnnnnnnnnnnnnnnnnnnnnnnnnnnnnnnnnnnnnnnnnnnnnnnnnnnnnnnnnnnnnnnnnnnnnnnnnnnnnnnnnnnnnnnnnnnnnnnnnnnnnnnnnnnnnnnnnnnnnnnnnnnnnnnnnnnnnnnnnnnnnnnnnnnnnnnnnnnnnnnnnnnnnnnnnnnnnnnnnnnnnnnnnnnnnnnnnnnnnnnnnnnnnnnnnnnnnnnnnnnnnnnnnnnnnnnnnnnnnnnnnnnnnnnnnnnnnnnnnnnnnnnnnnnnnnnnnnnnnnnnnnnnnnnnnnnnnnnnnnnnnnnnnnnnnnnnnnnnnnnnnnnnnnnnnnnnnnnnnnnnnnnnnnnnnnnnnnnnnnnnnnnnnnnnnnnnnnnnnnnnnnnnnnnnnnnnnnnnnnnnnnnnnnnnnnnnnnnnnnnnnnnnnnnnnnnnnnnnnnnnnnnnnnnnnnnnnnnnnnnnnnnnnnnnnnnnnnnnnnnnnnnnnnnnnnnnnnnnnnnnnnnnnnnnnnnnnnnnnnnnnnnnnnnnnnnnnnnnnnnnnnnnnnnnnnnnnnnnnnnnnnnnnnnnnnnnnnnnnnnnnnnnnnnnnnnnnnnnnnnnnnnnnnnnnnnnnnnnnnnnnnnnnnnnnnnnnnnnnnnnnnnnnnnnnnnnnnnnnnnnnnnnnnnnnnnnnnnnnnnnnnnnnnnnnnnnnnnnnnnnnnnnnnnnnnnnnnnnnnnnnnnnnnnnnnnnnnnnnnnnnnnnnnnnnnnnnnnnnnnnnnnnnnnnnnnnnnnnnnnnnnnnnnnnnnnnnnnnnnnnnnnnnnnnnnnnnnnnnnnnnnnnnnnnnnnnnnnnnnnnnnnnnnnnnnnnnnnnnnnnnnnnnnnnnnnnnnnnnnnnnnnnnnnnnnnnnnnnnnnnnnnnnnnnnnnnnnnnnnnnnnnnnnnnnnnnnnnnnnnnnnnnnnnnnnnnnnnnnnnnnnnnnnnnnnnnnnnnnnnnnnnnnnnnnnnnnnnnnnnnnnnnnnnnnnnnnnnnnnnnnnnnnnnnnnnnnnnnnnnnnnnnnnnnnnnnnnnnnnnnnnnnnnnnnnnnnnnnnnnnnnnnnnnnnnnnnnnnnnnnnnnnnnnnnnnnnnnnnnnnnnnnnnnnnnnnnnnnnnnnnnnnnnnnnnnnnnnnnnnnnnnnnnnnnnnnnnnnnnnnnnnnnnnnnnnnnnnnnnnnnnnnnnnnnnnnnnnnnnnnnnnnnnnnnnnnnnnnnnnnnnnnnnnnnnnnnnnnnnnnnnnnnnnnnnnnnnnnnnnnnnnnnnnnnnnnnnnnnnnnnnnnnnnnnnnnnnnnnnnnnnnnnnnnnnnnnnnnnnnnnnnnnnnnnnnnnnnnnnnnnnnnnnnnnnnnnnnnnnnnnnnnnnnnnnnnnnnnnnnnnnnnnnnnnnnnnnnnnnnnnnnnnnnnnnnnnnnnnnnnnnnnnnnnnnnnnnnnnnnnnnnnnnnnnnnnnnnnnnnnnnnnnnnnnnnnnnnnnnnnnnnnnnnnnnnnnnnnnnnnnnnnnnnnnnnnnnnnnnnnnnnnnnnnnnnnnnnnnnnnnnnnnnnnnnnnnnnnnnnnnnnnnnnnnnnnnnnnnnnnnnnnnnnnnnnnnnnnnnnnnnnnnnnnnnnnnnnnnnnnnnnnnnnnnnnnnnnnnnnnnnnnnnnnnnnnnnnnnnnnnnnnnnnnnnnnnnnnnnnnnnnnnnnnnnnnnnnnnnnnnnnnnnnnnnnnnnnnnnnnnnnnnnnnnnnnnnnnnnnnnnnnnnnnnnnnnnnnnnnnnnnnnnnnnnnnnnnnnnnnnnnnnnnnnnnnnnnnnnnnnnnnnnnnnnnnnnnnnnnnnnnnnnnnnnnnnnnnnnnnnnnnnnnnnnnnnnnnnnnnnnnnnnnnnnnnnnnnnnnnnnnnnnnnnnnnnnnnnnnnnnnnnnnnnnnnnnnnnnnnnnnnnnnnnnnnnnnnnnnnnnnnnnnnnnnnnnnnnnnnnnnnnnnnnnnnnnnnnnnnnnnnnnnnnnnnnnnnnnnnnnnnnnnnnnnnnnnnnnnnnnnnnnnnnnnnnnnnnnnnnnnnnnnnnnnnnnnnnnnnnnnnnnnnnnnnnnnnnnnnnnnnnnnnnnnnnnnnnnnnnnnnnnnnnnnnnnnnnnnnnnnnnnnnnnnnnnnnnnnnnnnnnnnnnnnnnnnnnnnnnnnnnnnnnnnnnnnnnnnnnnnnnnnnnnnnnnnnnnnnnnnnnnnnnnnnnnnnnnnnnnnnnnnnnnnnnnnnnnnnnnnnnnnnnnnnnnnnnnnnnnnnnnnnnnnnnnnnnnnnnnnnnnnnnnnnnnnnnnnnnnnnnnnnnnnnnnnnnnnnnnnnnnnnnnnnnnnnnnnnnnnnnnnnnnnnnnnnnnnnnnnnnnnnnnnnnnnnnnnnnnnnnnnnnnnnnnnnnnnnnnnnnnnnnnnnnnnnnnnnnnnnnnnnnnnnnnnnnnnnnnnnnnnnnnnnnnnnnnnnnnnnnnnnnnnnnnnnnnnnnnnnnnnnnnnnnnnnnnnnnnnnnnnnnnnnnnnnnnnnnnnnnnnnnnnnnnnnnnnnnnnnnnnnnnnnnnnnnnnnnnnnnnnnnnnnnnnnnnnnnnnnnnnnnnnnnnnnnnnnnnnnnnnnnnnnnnnnnnnnnnnnnnnnnnnnnnnnnnnnnnnnnnnnnnnnnnnnnnnnnnnnnnnnnnnnnnnnnnnnnnnnnnnnnnnnnnnnnnnnnnnnnnnnnnnnnnnnnnnnnnnnnnnnnnnnnnnnnnnnnnnnnnnnnnnnnnnnnnnnnnnnnnnnnnnnnnnnnnnnnnnnnnnnnnnnnnnnnnnnnnnnnnnnnnnnnnnnnnnnnnnnnnnnnnnnnnnnnnnnnnnnnnnnnnnnnnnnnnnnnnnnnnnnnnnnnnnnnnnnnnnnnnnnnnnnnnnnnnnnnnnnnnnnnnnnnnnnnnnnnnnnnnnnnnnnnnnnnnnnnnnnnnnnnnnnnnnnnnnnnnnnnnnnnnnnnnnnnnnnnnnnnnnnnnnnnnnnnnnnnnnnnnnnnnnnnnnnnnnnnnnnnnnnnnnnnnnnnnnnnnnnnnnnnnnnnnnnnnnnnnnnnnnnnnnnnnnnnnnnnnnnnnnnnnnnnnnnnnnnnnnnnnnnnnnnnnnnnnnnnnnnnnnnnnnnnnnnnnnnnnnnnnnnnnnnnnnnnnnnnnnnnnnnnnnnnnnnnnnnnnnnnnnnnnnnnnnnnnnnnnnnnnnnnnnnnnnnnnnnnnnnnnnnnnnnnnnnnnnnnnnnnnnnnnnnnnnnnnnnnnnnnnnnnnnnnnnnnnnnnnnnnnnnnnnnnnnnnnnnnnnnnnnnnnnnnnnnnnnnnnnnnnnnnnnnnnnnnnnnnnnnnnnnnnnnnnnnnnnnnnnnnnnnnnnnnnnnnnnnnnnnnnnnnnnnnnnnnnnnnnnnnnnnnnnnnnnnnnnnnnnnnnnnnnnnnnnnnnnnnnnnnnnnnnnnnnnnnnnnnnnnnnnnnnnnnnnnnnnnnnnnnnnnnnnnnnnnnnnnnnnnnnnnnnnnnnnnnnnnnnnnnnnnnnnnnnnnnnnnnnnnnnnnnnnnnnnnnnnnnnnnnnnnnnnnnnnnnnnnnnnnnnnnnnnnnnnnnnnnnnnnnnnnnnnnnnnnnnnnnnnnnnnnnnnnnnnnnnnnnnnnnnnnnnnnnnnnnnnnnnnnnnnnnnnnnnnnnnnnnnnnnnnnnnnnnnnnnnnnnnnnnnnnnnnnnnnnnnnnnnnnnnnnnnnnnnnnnnnnnnnnnnnnnnnnnnnnnnnnnnnnnnnnnnnnnnnnnnnnnnnnnnnnnnnnnnnnnnnnnnnnnnnnnnnnnnnnnnnnnnnnnnnnnnnnnnnnnnnnnnnnnnnnnnnnnnnnnnnnnnnnnnnnnnnnnnnnnnnnnnnnnnnnnnnnnnnnnnnnnnnnnnnnnnnnnnnnnnnnnnnnnnnnnnnnnnnnnnnnnnnnnnnnnnnnnnnnnnnnnnnnnnnnnnnnnnnnnnnnnnnnnnnnnnnnnnnnnnnnnnnnnnnnnnnnnnnnnnnnnnnnnnnnnnnnnnnnnnnnnnnnnnnnnnnnnnnnnnnnnnnnnnnnnnnnnnnnnnnnnnnnnnnnnnnnnnnnnnnnnnnnnnnnnnnnnnnnnnnnnnnnnnnnnnnnnnnnnnnnnnnnnnnnnnnnnnnnnnnnnnnnnnnnnnnnnnnnnnnnnnnnnnnnnnnnnnnnnnnnnnnnnnnnnnnnnnnnnnnnnnnnnnnnnnnnnnnnnnnnnnnnnnnnnnnnnnnnnnnnnnnnnnnnnnnnnnnnnnnnnnnnnnnnnnnnnnnnnnnnnnnnnnnnnnnnnnnnnnnnnnnnnnnnnnnnnnnnnnnnnnnnnnnnnnnnnnnnnnnnnnnnnnnnnnnnnnnnnnnnnnnnnnnnnnnnnnnnnnnnnnnnnnnnnnnnnnnnnnnnnnnnnnnnnnnnnnnnnnnnnnnnnnnnnnnnnnnnnnnnnnnnnnnnnnnnnnnnnnnnnnnnnnnnnnnnnnnnnnnnnnnnnnnnnnnnnnnnnnnnnnnnnnnnnnnnnnnnnnnnnnnnnnnnnnnnnnnnnnnnnnnnnnnnnnnnnnnnnnnnnnnnnnnnnnnnnnnnnnnnnnnnnnnnnnnnnnnnnnnnnnnnnnnnnnnnnnnnnnnnnnnnnnnnnnnnnnnnnnnnnnnnnnnnnnnnnnnnnnnnnnnnnnnnnnnnnnnnnnnnnnnnnnnnnnnnnnnnnnnnnnnnnnnnnnnnnnnnnnnnnnnnnnnnnnnnnnnnnnnnnnnnnnnnnnnnnnnnnnnnnnnnnnnnnnnnnnnnnnnnnnnnnnnnnnnnnnnnnnnnnnnnnnnnnnnnnnnnnnnnnnnnnnnnnnnnnnnnnnnnnnnnnnnnnnnnnnnnnnnnnnnnnnnnnnnnnnnnnnnnnnnnnnnnnnnnnnnnnnnnnnnnnnnnnnnnnnnnnnnnnnnnnnnnnnnnnnnnnnnnnnnnnnnnnnnnnnnnnnnnnnnnnnnnnnnnnnnnnnnnnnnnnnnnnnnnnnnnnnnnnnnnnnnnnnnnnnnnnnnnnnnnnnnnnnnnnnnnnnnnnnnnnnnnnnnnnnnnnnnnnnnnnnnnnnnnnnnnnnnnnnnnnnnnnnnnnnnnnnnnnnnnnnnnnnnnnnnnnnnnnnnnnnnnnnnnnnnnnnnnnnnnnnnnnnnnnnnnnnnnnnnnnnnnnnnnnnnnnnnnnnnnnnnnnnnnnnnnnnnnnnnnnnnnnnnnnnnnnnnnnnnnnnnnnnnnnnnnnnnnnnnnnnnnnnnnnnnnnnnnnnnnnnnnnnnnnnnnnnnnnnnnnnnnnnnnnnnnnnnnnnnnnnnnnnnnnnnnnnnnnnnnnnnnnnnnnnnnnnnnnnnnnnnnnnnnnnnnnnnnnnnnnnnnnnnnnnnnnnnnnnnnnnnnnnnnnnnnnnnnnnnnnnnnnnnnnnnnnnnnnnnnnnnnnnnnnnnnnnnnnnnnnnnnnnnnnnnnnnnnnnnnnnnnnnnnnnnnnnnnnnnnnnnnnnnnnnnnnnnnnnnnnnnnnnnnnnnnnnnnnnnnnnnnnnnnnnnnnnnnnnnnnnnnnnnnnnnnnnnnnnnnnnnnnnnnnnnnnnnnnnnnnnnnnnnnnnnnnnnnnnnnnnnnnnnnnnnnnnnnnnnnnnnnnnnnnnnnnnnnnnnnnnnnnnnnnnnnnnnnnnnnnnnnnnnnnnnnnnnnnnnnnnnnnnnnnnnnnnnnnnnnnnnnnnnnnnnnnnnnnnnnnnnnnnnnnnnnnnnnnnnnnnnnnnnnnnnnnnnnnnnnnnnnnnnnnnnnnnnnnnnnnnnnnnnnnnnnnnnnnnnnnnnnnnnnnnnnnnnnnnnnnnnnnnnnnnnnnnnnnnnnnnnnnnnnnnnnnnnnnnnnnnnnnnnnnnnnnnnnnnnnnnnnnnnnnnnnnnnnnnnnnnnnnnnnnnnnnnnnnnnnnnnnnnnnnnnnnnnnnnnnnnnnnnnnnnnnnnnnnnnnnnnnnnnnnnnnnnnnnnnnnnnnnnnnnnnnnnnnnnnnnnnnnnnnnnnnnnnnnnnnnnnnnnnnnnnnnnnnnnnnnnnnnnnnnnnnnnnnnnnnnnnnnnnnnnnnnnnnnnnnnnnnnnnnnnnnnnnnnnnnnnnnnnnnnnnnnnnnnnnnnnnnnnnnnnnnnnnnnnnnnnnnnnnnnnnnnnnnnnnnnnnnnnnnnnnnnnnnnnnnnnnnnnnnnnnnnnnnnnnnnnnnnnnnnnnnnnnnnnnnnnnnnnnnnnnnnnnnnnnnnnnnnnnnnnnnnnnnnnnnnnnnnnnnnnnnnnnnnnnnnnnnnnnnnnnnnnnnnnnnnnnnnnnnnnnnnnnnnnnnnnnnnnnnnnnnnnnnnnnnnnnnnnnnnnnnnnnnnnnnnnnnnnnnnnnnnnnnnnnnnnnnnnnnnnnnnnnnnnnnnnnnnnnnnnnnnnnnnnnnnnnnnnnnnnnnnnnnnnnnnnnnnnnnnnnnnnnnnnnnnnnnnnnnnnnnnnnnnnnnnnnnnnnnnnnnnnnnnnnnnnnnnnnnnnnnnnnnnnnnnnnnnnnnnnnnnnnnnnnnnnnnnnnnnnnnnnnnnnnnnnnnnnnnnnnnnnnnnnnnnnnnnnnnnnnnnnnnnnnnnnnnnnnnnnnnnnnnnnnnnnnnnnnnnnnnnnnnnnnnnnnnnnnnnnnnnnnnnnnnnnnnnnnnnnnnnnnnnnnnnnnnnnnnnnnnnnnnnnnnnnnnnnnnnnnnnnnnnnnnnnnnnnnnnnnnnnnnnnnnnnnnnnnnnnnnnnnnnnnnnnnnnnnnnnnnnnnnnnnnnnnnnnnnnnnnnnnnnnnnnnnnnnnnnnnnnnnnnnnnnnnnnnnnnnnnnnnnnnnnnnnnnnnnnnnnnnnnnnnnnnnnnnnnnnnnnnnnnnnnnnnnnnnnnnnnnnnnnnnnnnnnnnnnnnnnnnnnnnnnnnnnnnnnnnnnnnnnnnnnnnnnnnnnnnnnnnnnnnnnnnnnnnnnnnnnnnnnnnnnnnnnnnnnnnnnnnnnnnnnnnnnnnnnnnnnnnnnnnnnnnnnnnnnnnnnnnnnnnnnnnnnnnnnnnnnnnnnnnnnnnnnnnnnnnnnnnnnnnnnnnnnnnnnnnnnnnnnnnnnnnnnnnnnnnnnnnnnnnnnnnnnnnnnnnnnnnnnnnnnnnnnnnnnnnnnnnnnnnnnnnnnnnnnnnnnnnnnnnnnnnnnnnnnnnnnnnnnnnnnnnnnnnnnnnnnnnnnnnnnnnnnnnnnnnnnnnnnnnnnnnnnnnnnnnnnnnnnnnnnnnnnnnnnnnnnnnnnnnnnnnnnnnnnnnnnnnnnnnnnnnnnnnnnnnnnnnnnnnnnnnnnnnnnnnnnnnnnnnnnnnnnnnnnnnnnnnnnnnnnnnnnnnnnnnnnnnnnnnnnnnnnnnnnnnnnnnnnnnnnnnnnnnnnnnnnnnnnnnnnnnnnnnnnnnnnnnnnnnnnnnnnnnnnnnnnnnnnnnnnnnnnnnnnnnnnnnnnnnnnnnnnnnnnnnnnnnnnnnnnnnnnnnnnnnnnnnnnnnnnnnnnnnnnnnnnnnnnnnnnnnnnnnnnnnnnnnnnnnnnnnnnnnnnnnnnnnnnnnnnnnnnnnnnnnnnnnnnnnnnnnnnnnnnnnnnnnnnnnnnnnnnnnnnnnnnnnnnnnnnnnnnnnnnnnnnnnnnnnnnnnnnnnnnnnnnnnnnnnnnnnnnnnnnnnnnnnnnnnnnnnnnnnnnnnnnnnnnnnnnnnnnnnnnnnnnnnnnnnnnnnnnnnnnnnnnnnnnnnnnnnnnnnnnnnnnnnnnnnnnnnnnnnnnnnnnnnnnnnnnnnnnnnnnnnnnnnnnnnnnnnnnnnnnnnnnnnnnnnnnnnnnnnnnnnnnnnnnnnnnnnnnnnnnnnnnnnnnnnnnnnnnnnnnnnnnnnnnnnnnnnnnnnnnnnnnnnnnnnnnnnnnnnnnnnnnnnnnnnnnnnnnnnnnnnnnnnnnnnnnnnnnnnnnnnnnnnnnnnnnnnnnnnnnnnnnnnnnnnnnnnnnnnnnnnnnnnnnnnnnnnnnnnnnnnnnnnnnnnnnnnnnnnnnnnnnnnnnnnnnnnnnnnnnnnnnnnnnnnnnnnnnnnnnnnnnnnnnnnnnnnnnnnnnnnnnnnnnnnnnnnnnnnnnnnnnnnnnnnnnnnnnnnnnnnnnnnnnnnnnnnnnnnnnnnnnnnnnnnnnnnnnnnnnnnnnnnnnnnnnnnnnnnnnnnnnnnnnnnnnnnnnnnnnnnnnnnnnnnnnnnnnnnnnnnnnnnnnnnnnnnnnnnnnnnnnnnnnnnnnnnnnnnnnnnnnnnnnnnnnnnnnnnnnnnnnnnnnnnnnnnnnnnnnnnnnnnnnnnnnnnnnnnnnnnnnnnnnnnnnnnnnnnnnnnnnnnnnnnnnnnnnnnnnnnnnnnnnnnnnnnnnnnnnnnnnnnnnnnnnnnnnnnnnnnnnnnnnnnnnnnnnnnnnnnnnnnnnnnnnnnnnnnnnnnnnnnnnnnnnnnnnnnnnnnnnnnnnnnnnnnnnnnnnnnnnnnnnnnnnnnnnnnnnnnnnnnnnnnnnnnnnnnnnnnnnnnnnnnnnnnnnnnnnnnnnnnnnnnnnnnnnnnnnnnnnnnnnnnnnnnnnnnnnnnnnnnnnnnnnnnnnnnnnnnnnnnnnnnnnnnnnnnnnnnnnnnnnnnnnnnnnnnnnnnnnnnnnnnnnnnnnnnnnnnnnnnnnnnnnnnnnnnnnnnnnnnnnnnnnnnnnnnnnnnnnnnnnnnnnnnnnnnnnnnnnnnnnnnnnnnnnnnnnnnnnnnnnnnnnnnnnnnnnnnnnnnnnnnnnnnnnnnnnnnnnnnnnnnnnnnnnnnnnnnnnnnnnnnnnnnnnnnnnnnnnnnnnnnnnnnnnnnnnnnnnnnnnnnnnnnnnnnnnnnnnnnnnnnnnnnnnnnnnnnnnnnnnnnnnnnnnnnnnnnnnnnnnnnnnnnnnnnnnnnnnnnnnnnnnnnnnnnnnnnnnnnnnnnnnnnnnnnnnnnnnnnnnnnnnnnnnnnnnnnnnnnnnnnnnnnnnnnnnnnnnnnnnnnnnnnnnnnnnnnnnnnnnnnnnnnnnnnnnnnnnnnnnnnnnnnnnnnnnnnnnnnnnnnnnnnnnnnnnnnnnnnnnnnnnnnnnnnnnnnnnnnnnnnnnnnnnnnnnnnnnnnnnnnnnnnnnnnnnnnnnnnnnnnnnnnnnnnnnnnnnnnnnnnnnnnnnnnnnnnnnnnnnnnnnnnnnnnnnnnnnnnnnnnnnnnnnnnnnnnnnnnnnnnnnnnnnnnnnnnnnnnnnnnnnnnnnnnnnnnnnnnnnnnnnnnnnnnnnnnnnnnnnnnnnnnnnnnnnnnnnnnnnnnnnnnnnnnnnnnnnnnnnnnnnnnnnnnnnnnnnnnnnnnnnnnnnnnnnnnnnnnnnnnnnnnnnnnnnnnnnnnnnnnnnnnnnnnnnnnnnnnnnnnnnnnnnnnnnnnnnnnnnnnnnnnnnnnnnnnnnnnnnnnnnnnnnnnnnnnnnnnnnnnnnnnnnnnnnnnnnnnnnnnnnnnnnnnnnnnnnnnnnnnnnnnnnnnnnnnnnnnnnnnnnnnnnnnnnnnnnnnnnnnnnnnnnnnnnnnnnnnnnnnnnnnnnnnnnnnnnnnnnnnnnnnnnnnnnnnnnnnnnnnnnnnnnnnnnnnnnnnnnnnnnnnnnnnnnnnnnnnnnnnnnnnnnnnnnnnnnnnnnnnnnnnnnnnnnnnnnnnnnnnnnnnnnnnnnnnnnnnnnnnnnnnnnnnnnnnnnnnnnnnnnnnnnnnnnnnnnnnnnnnnnnnnnnnnnnnnnnnnnnnnnnnnnnnnnnnnnnnnnnnnnnnnnnnnnnnnnnnnnnnnnnnnnnnnnnnnnnnnnnnnnnnnnnnnnnnnnnnnnnnnnnnnnnnnnnnnnnnnnnnnnnnnnnnnnnnnnnnnnnnnnnnnnnnnnnnnnnnnnnnnnnnnnnnnnnnnnnnnnnnnnnnnnnnnnnnnnnnnnnnnnnnnnnnnnnnnnnnnnnnnnnnnnnnnnnnnnnnnnnnnnnnnnnnnnnnnnnnnnnnnnnnnnnnnnnnnnnnnnnnnnnnnnnnnnnnnnnnnnnnnnnnnnnnnnnnnnnnnnnnnnnnnnnnnnnnnnnnnnnnnnnnnnnnnnnnnnnnnnnnnnnnnnnnnnnnnnnnnnnnnnnnnnnnnnnnnnnnnnnnnnnnnnnnnnnnnnnnnnnnnnnnnnnnnnnnnnnnnnnnnnnnnnnnnnnnnnnnnnnnnnnnnnnnnnnnnnnnnnnnnnnnnnnnnnnnnnnnnnnnnnnnnnnnnnnnnnnnnnnnnnnnnnnnnnnnnnnnnnnnnnnnnnnnnnnnnnnnnnnnnnnnnnnnnnnnnnnnnnnnnnnnnnnnnnnnnnnnnnnnnnnnnnnnnnnnnnnnnnnnnnnnnnnnnnnnnnnnnnnnnnnnnnnnnnnnnnnnnnnnnnnnnnnnnnnnnnnnnnnnnnnnnnnnnnnnnnnnnnnnnnnnnnnnnnnnnnnnnnnnnnnnnnnnnnnnnnnnnnnnnnnnnnnnnnnnnnnnnnnnnnnnnnnnnnnnnnnnnnnnnnnnnnnnnnnnnnnnnnnnnnnnnnnnnnnnnnnnnnnnnnnnnnnnnnnnnnnnnnnnnnnnnnnnnnnnnnnnnnnnnnnnnnnnnnnnnnnnnnnnnnnnnnnnnnnnnnnnnnnnnnnnnnnnnnnnnnnnnnnnnnnnnnnnnnnnnnnnnnnnnnnnnnnnnnnnnnnnnnnnnnnnnnnnnnnnnnnnnnnnnnnnnnnnnnnnnnnnnnnnnnnnnnnnnnnnnnnnnnnnnnnnnnnnnnnnnnnnnnnnnnnnnnnnnnnnnnnnnnnnnnnnnnnnnnnnnnnnnnnnnnnnnnnnnnnnnnnnnnnnnnnnnnnnnnnnnnnnnnnnnnnnnnnnnnnnnnnnnnnnnnnnnnnnnnnnnnnnnnnnnnnnnnnnnnnnnnnnnnnnnnnnnnnnnnnnnnnnnnnnnnnnnnnnnnnnnnnnnnnnnnnnnnnnnnnnnnnnnnnnnnnnnnnnnnnnnnnnnnnnnnnnnnnnnnnnnnnnnnnnnnnnnnnnnnnnnnnnnnnnnnnnnnnnnnnnnnnnnnnnnnnnnnnnnnnnnnnnnnnnnnnnnnnnnnnnnnnnnnnnnnnnnnnnnnnnnnnnnnnnnnnnnnnnnnnnnnnnnnnnnnnnnnnnnnnnnnnnnnnnnnnnnnnnnnnnnnnnnnnnnnnnnnnnnnnnnnnnnnnnnnnnnnnnnnnnnnnnnnnnnnnnnnnnnnnnnnnnnnnnnnnnnnnnnnnnnnnnnnnnnnnnnnnnnnnnnnnnnnnnnnnnnnnnnnnnnnnnnnnnnnnnnnnnnnnnnnnnnnnnnnnnnnnnnnnnnnnnnnnnnnnnnnnnnnnnnnnnnnnnnnnnnnnnnnnnnnnnnnnnnnnnnnnnnnnnnnnnnnnnnnnnnnnnnnnnnnnnnnnnnnnnnnnnnnnnnnnnnnnnnnnnnnnnnnnnnnnnnnnnnnnnnnnnnnnnnnnnnnnnnnnnnnnnnnnnnnnnnnnnnnnnnnnnnnnnnnnnnnnnnnnnnnnnnnnnnnnnnnnnnnnnnnnnnnnnnnnnnnnnnnnnnnnnnnnnnnnnnnnnnnnnnnnnnnnnnnnnnnnnnnnnnnnnnnnnnnnnnnnnnnnnnnnnnnnnnnnnnnnnnnnnnnnnnnnnnnnnnnnnnnnnnnnnnnnnnnnnnnnnnnnnnnnnnnnnnnnnnnnnnnnnnnnnnnnnnnnnnnnnnnnnnnnnnnnnnnnnnnnnnnnnnnnnnnnnnnnnnnnnnnnnnnnnnnnnnnnnnnnnnnnnnnnnnnnnnnnnnnnnnnnnnnnnnnnnnnnnnnnnnnnnnnnnnnnnnnnnnnnnnnnnnnnnnnnnnnnnnnnnnnnnnnnnnnnnnnnnnnnnnnnnnnnnnnnnnnnnnnnnnnnnnnnnnnnnnnnnnnnnnnnnnnnnnnnnnnnnnnnnnnnnnnnnnnnnnnnnnnnnnnnnnnnnnnnnnnnnnnnnnnnnnnnnnnnnnnnnnnnnnnnnnnnnnnnnnnnnnnnnnnnnnnnnnnnnnnnnnnnnnnnnnnnnnnnnnnnnnnnnnnnnnnnnnnnnnnnnnnnnnnnnnnnnnnnnnnnnnnnnnnnnnnnnnnnnnnnnnnnnnnnnnnnnnnnnnnnnnnnnnnnnnnnnnnnnnnnnnnnnnnnnnnnnnnnnnnnnnnnnnnnnnnnnnnnnnnnnnnnnnnnnnnnnnnnnnnnnnnnnnnnnnnnnnnnnnnnnnnnnnnnnnnnnnnnnnnnnnnnnnnnnnnnnnnnnnnnnnnnnnnnnnnnnnnnnnnnnnnnnnnnnnnnnnnnnnnnnnnnnnnnnnnnnnnnnnnnnnnnnnnnnnnnnnnnnnnnnnnnnnnnnnnnnnnnnnnnnnnnnnnnnnnnnnnnnnnnnnnnnnnnnnnnnnnnnnnnnnnnnnnnnnnnnnnnnnnnnnnnnnnnnnnnnnnnnnnnnnnnnnnnnnnnnnnnnnnnnnnnnnnnnnnnnnnnnnnnnnnnnnnnnnnnnnnnnnnnnnnnnnnnnnnnnnnnnnnnnnnnnnnnnnnnnnnnnnnnnnnnnnnnnnnnnnnnnnnnnnnnnnnnnnnnnnnnnnnnnnnnnnnnnnnnnnnnnnnnnnnnnnnnnnnnnnnnnnnnnnnnnnnnnnnnnnnnnnnnnnnnnnnnnnnnnnnnnnnnnnnnnnnnnnnnnnnnnnnnnnnnnnnnnnnnnnnnnnnnnnnnnnnnnnnnnnnnnnnnnnnnnnnnnnnnnnnnnnnnnnnnnnnnnnnnnnnnnnnnnnnnnnnnnnnnnnnnnnnnnnnnnnnnnnnnnnnnnnnnnnnnnnnnnnnnnnnnnnnnnnnnnnnnnnnnnnnnnnnnnnnnnnnnnnnnnnnnnnnnnnnnnnnnnnnnnnnnnnnnnnnnnnnnnnnnnnnnnnnnnnnnnnnnnnnnnnnnnnnnnnnnnnnnnnnnnnnnnnnnnnnnnnnnnnnnnnnnnnnnnnnnnnnnnnnnnnnnnnnnnnnnnnnnnnnnnnnnnnnnnnnnnnnnnnnnnnnnnnnnnnnnnnnnnnnnnnnnnnnnnnnnnnnnnnnnnnnnnnnnnnnnnnnnnnnnnnnnnnnnnnnnnnnnnnnnnnnnnnnnnnnnnnnnnnnnnnnnnnnnnnnnnnnnnnnnnnnnnnnnnnnnnnnnnnnnnnnnnnnnnnnnnnnnnnnnnnnnnnnnnnnnnnnnnnnnnnnnnnnnnnnnnnnnnnnnnnnnnnnnnnnnnnnnnnnnnnnnnnnnnnnnnnnnnnnnnnnnnnnnnnnnnnnnnnnnnnnnnnnnnnnnnnnnnnnnnnnnnnnnnnnnnnnnnnnnnnnnnnnnnnnnnnnnnnnnnnnnnnnnnnnnnnnnnnnnnnnnnnnnnnnnnnnnnnnnnnnnnnnnnnnnnnnnnnnnnnnnnnnnnnnnnnnnnnnnnnnnnnnnnnnnnnnnnnnnnnnnnnnnnnnnnnnnnnnnnnnnnnnnnnnnnnnnnnnnnnnnnnnnnnnnnnnnnnnnnnnnnnnnnnnnnnnnnnnnnnnnnnnnnnnnnnnnnnnnnnnnnnnnnnnnnnnnnnnnnnnnnnnnnnnnnnnnnnnnnnnnnnnnnnnnnnnnnnnnnnnnnnnnnnnnnnnnnnnnnnnnnnnnnnnnnnnnnnnnnnnnnnnnnnnnnnnnnnnnnnnnnnnnnnnnnnnnnnnnnnnnnnnnnnnnnnnnnnnnnnnnnnnnnnnnnnnnnnnnnnnnnnnnnnnnnnnnnnnnnnnnnnnnnnnnnnnnnnnnnnnnnnnnnnnnnnnnnnnnnnnnnnnnnnnnnnnnnnnnnnnnnnnnnnnnnnnnnnnnnnnnnnnnnnnnnnnnnnnnnnnnnnnnnnnnnnnnnnnnnnnnnnnnnnnnnnnnnnnnnnnnnnnnnnnnnnnnnnnnnnnnnnnnnnnnnnnnnnnnnnnnnnnnnnnnnnnnnnnnnnnnnnnnnnnnnnnnnnnnnnnnnnnnnnnnnnnnnnnnnnnnnnnnnnnnnnnnnnnnnnnnnnnnnnnnnnnnnnnnnnnnnnnnnnnnnnnnnnnnnnnnnnnnnnnnnnnnnnnnnnnnnnnnnnnnnnnnnnnnnnnnnnnnnnnnnnnnnnnnnnnnnnnnnnnnnnnnnnnnnnnnnnnnnnnnnnnnnnnnnnnnnnnnnnnnnnnnnnnnnnnnnnnnnnnnnnnnnnnnnnnnnnnnnnnnnnnnnnnnnnnnnnnnnnnnnnnnnnnnnnnnnnnnnnnnnnnnnnnnnnnnnnnnnnnnnnnnnnnnnnnnnnnnnnnnnnnnnnnnnnnnnnnnnnnnnnnnnnnnnnnnnnnnnnnnnnnnnnnnnnnnnnnnnnnnnnnnnnnnnnnnnnnnnnnnnnnnnnnnnnnnnnnnnnnnnnnnnnnnnnnnnnnnnnnnnnnnnnnnnnnnnnnnnnnnnnnnnnnnnnnnnnnnnnnnnnnnnnnnnnnnnnnnnnnnnnnnnnnnnnnnnnnnnnnnnnnnnnnnnnnnnnnnnnnnnnnnnnnnnnnnnnnnnnnnnnnnnnnnnnnnnnnnnnnnnnnnnnnnnnnnnnnnnnnnnnnnnnnnnnnnnnnnnnnnnnnnnnnnnnnnnnnnnnnnnnnnnnnnnnnnnnnnnnnnnnnnnnnnnnnnnnnnnnnnnnnnnnnnnnnnnnnnnnnnnnnnnnnnnnnnnnnnnnnnnnnnnnnnnnnnnnnnnnnnnnnnnnnnnnnnnnnnnnnnnnnnnnnnnnnnnnnnnnnnnnnnnnnnnnnnnnnnnnnnnnnnnnnnnnnnnnnnnnnnnnnnnnnnnnnnnnnnnnnnnnnnnnnnnnnnnnnnnnnnnnnnnnnnnnnnnnnnnnnnnnnnnnnnnnnnnnnnnnnnnnnnnnnnnnnnnnnnnnnnnnnnnnnnnnnnnnnnnnnnnnnnnnnnnnnnnnnnnnnnnnnnnnnnnnnnnnnnnnnnnnnnnnnnnnnnnnnnnnnnnnnnnnnnnnnnnnnnnnnnnnnnnnnnnnnnnnnnnnnnnnnnnnnnnnnnnnnnnnnnnnnnnnnnnnnnnnnnnnnnnnnnnnnnnnnnnnnnnnnnnnnnnnnnnnnnnnnnnnnnnnnnnnnnnnnnnnnnnnnnnnnnnnnnnnnnnnnnnnnnnnnnnnnnnnnnnnnnnnnnnnnnnnnnnnnnnnnnnnnnnnnnnnnnnnnnnnnnnnnnnnnnnnnnnnnnnnnnnnnnnnnnnnnnnnnnnnnnnnnnnnnnnnnnnnnnnnnnnnnnnnnnnnnnnnnnnnnnnnnnnnnnnnnnnnnnnnnnnnnnnnnnnnnnnnnnnnnnnnnnnnnnnnnnnnnnnnnnnnnnnnnnnnnnnnnnnnnnnnnnnnnnnnnnnnnnnnnnnnnnnnnnnnnnnnnnnnnnnnnnnnnnnnnnnnnnnnnnnnnnnnnnnnnnnnnnnnnnnnnnnnnnnnnnnnnnnnnnnnnnnnnnnnnnnnnnnnnnnnnnnnnnnnnnnnnnnnnnnnnnnnnnnnnnnnnnnnnnnnnnnnnnnnnnnnnnnnnnnnnnnnnnnnnnnnnnnnnnnnnnnnnnnnnnnnnnnnnnnnnnnnnnnnnnnnnnnnnnnnnnnnnnnnnnnnnnnnnnnnnnnnnnnnnnnnnnnnnnnnnnnnnnnnnnnnnnnnnnnnnnnnnnnnnnnnnnnnnnnnnnnnnnnnnnnnnnnnnnnnnnnnnnnnnnnnnnnnnnnnnnnnnnnnnnnnnnnnnnnnnnnnnnnnnnnnnnnnnnnnnnnnnnnnnnnnnnnnnnnnnnnnnnnnnnnnnnnnnnnnnnnnnnnnnnnnnnnnnnnnnnnnnnnnnnnnnnnnnnnnnnnnnnnnnnnnnnnnnnnnnnnnnnnnnnnnnnnnnnnnnnnnnnnnnnnnnnnnnnnnnnnnnnnnnnnnnnnnnnnnnnnnnnnnnnnnnnnnnnnnnnnnnnnnnnnnnnnnnnnnnnnnnnnnnnnnnnnnnnnnnnnnnnnnnnnnnnnnnnnnnnnnnnnnnnnnnnnnnnnnnnnnnnnnnnnnnnnnnnnnnnnnnnnnnnnnnnnnnnnnnnnnnnnnnnnnnnnnnnnnnnnnnnnnnnnnnnnnnnnnnnnnnnnnnnnnnnnnnnnnnnnnnnnnnnnnnnnnnnnnnnnnnnnnnnnnnnnnnnnnnnnnnnnnnnnnnnnnnnnnnnnnnnnnnnnnnnnnnnnnnnnnnnnnnnnnnnnnnnnnnnnnnnnnnnnnnnnnnnnnnnnnnnnnnnnnnnnnnnnnnnnnnnnnnnnnnnnnnnnnnnnnnnnnnnnnnnnnnnnnnnnnnnnnnnnnnnnnnnnnnnnnnnnnnnnnnnnnnnnnnnnnnnnnnnnnnnnnnnnnnnnnnnnnnnnnnnnnnnnnnnnnnnnnnnnnnnnnnnnnnnnnnnnnnnnnnnnnnnnnnnnnnnnnnnnnnnnnnnnnnnnnnnnnnnnnnnnnnnnnnnnnnnnnnnnnnnnnnnnnnnnnnnnnnnnnnnnnnnnnnnnnnnnnnnnnnnnnnnnnnnnnnnnnnnnnnnnnnnnnnnnnnnnnnnnnnnnnnnnnnnnnnnnnnnnnnnnnnnnnnnnnnnnnnnnnnnnnnnnnnnnnnnnnnnnnnnnnnnnnnnnnnnnnnnnnnnnnnnnnnnnnnnnnnnnnnnnnnnnnnnnnnnnnnnnnnnnnnnnnnnnnnnnnnnnnnnnnnnnnnnnnnnnnnnnnnnnnnnnnnnnnnnnnnnnnnnnnnnnnnnnnnnnnnnnnnnnnnnnnnnnnnnnnnnnnnnnnnnnnnnnnnnnnnnnnnnnnnnnnnnnnnnnnnnnnnnnnnnnnnnnnnnnnnnnnnnnnnnnnnnnnnnnnnnnnnnnnnnnnnnnnnnnnnnnnnnnnnnnnnnnnnnnnnnnnnnnnnnnnnnnnnnnnnnnnnnnnnnnnnnnnnnnnnnnnnnnnnnnnnnnnnnnnnnnnnnnnnnnnnnnnnnnnnnnnnnnnnnnnnnnnnnnnnnnnnnnnnnnnnnnnnnnnnnnnnnnnnnnnnnnnnnnnnnnnnnnnnnnnnnnnnnnnnnnnnnnnnnnnnnnnnnnnnnnnnnnnnnnnnnnnnnnnnnnnnnnnnnnnnnnnnnnnnnnnnnnnnnnnnnnnnnnnnnnnnnnnnnnnnnnnnnnnnnnnnnnnnnnnnnnnnnnnnnnnnnnnnnnnnnnnnnnnnnnnnnnnnnnnnnnnnnnnnnnnnnnnnnnnnnnnnnnnnnnnnnnnnnnnnnnnnnnnnnnnnnnnnnnnnnnnnnnnnnnnnnnnnnnnnnnnnnnnnnnnnnnnnnnnnnnnnnnnnnnnnnnnnnnnnnnnnnnnnnnnnnnnnnnnnnnnnnnnnnnnnnnnnnnnnnnnnnnnnnnnnnnnnnnnnnnnnnnnnnnnnnnnnnnnnnnnnnnnnnnnnnnnnnnnnnnnnnnnnnnnnnnnnnnnnnnnnnnnnnnnnnnnnnnnnnnnnnnnnnnnnnnnnnnnnnnnnnnnnnnnnnnnnnnnnnnnnnnnnnnnnnnnnnnnnnnnnnnnnnnnnnnnnnnnnnnnnnnnnnnnnnnnnnnnnnnnnnnnnnnnnnnnnnnnnnnnnnnnnnnnnnnnnnnnnnnnnnnnnnnnnnnnnnnnnnnnnnnnnnnnnnnnnnnnnnnnnnnnnnnnnnnnnnnnnnnnnnnnnnnnnnnnnnnnnnnnnnnnnnnnnnnnnnnnnnnnnnnnnnnnnnnnnnnnnnnnnnnnnnnnnnnnnnnnnnnnnnnnnnnnnnnnnnnnnnnnnnnnnnnnnnnnnnnnnnnnnnnnnnnnnnnnnnnnnnnnnnnnnnnnnnnnnnnnnnnnnnnnnnnnnnnnnnnnnnnnnnnnnnnnnnnnnnnnnnnnnnnnnnnnnnnnnnnnnnnnnnnnnnnnnnnnnnnnnnnnnnnnnnnnnnnnnnnnnnnnnnnnnnnnnnnnnnnnnnnnnnnnnnnnnnnnnnnnnnnnnnnnnnnnnnnnnnnnnnnnnnnnnnnnnnnnnnnnnnnnnnnnnnnnnnnnnnnnnnnnnnnnnnnnnnnnnnnnnnnnnnnnnnnnnnnnnnnnnnnnnnnnnnnnnnnnnnnnnnnnnnnnnnnnnnnnnnnnnnnnnnnnnnnnnnnnnnnnnnnnnnnnnnnnnnnnnnnnnnnnnnnnnnnnnnnnnnnnnnnnnnnnnnnnnnnnnnnnnnnnnnnnnnnnnnnnnnnnnnnnnnnnnnnnnnnnnnnnnnnnnnnnnnnnnnnnnnnnnnnnnnnnnnnnnnnnnnnnnnnnnnnnnnnnnnnnnnnnnnnnnnnnnnnnnnnnnnnnnnnnnnnnnnnnnnnnnnnnnnnnnnnnnnnnnnnnnnnnnnnnnnnnnnnnnnnnnnnnnnnnnnnnnnnnnnnnnnnnnnnnnnnnnnnnnnnnnnnnnnnnnnnnnnnnnnnnnnnnnnnnnnnnnnnnnnnnnnnnnnnnnnnnnnnnnnnnnnnnnnnnnnnnnnnnnnnnnnnnnnnnnnnnnnnnnnnnnnnnnnnnnnnnnnnnnnnnnnnnnnnnnnnnnnnnnnnnnnnnnnnnnnnnnnnnnnnnnnnnnnnnnnnnnnnnnnnnnnnnnnnnnnnnnnnnnnnnnnnnnnnnnnnnnnnnnnnnnnnnnnnnnnnnnnnnnnnnnnnnnnnnnnnnnnnnnnnnnnnnnnnnnnnnnnnnnnnnnnnnnnnnnnnnnnnnnnnnnnnnnnnnnnnnnnnnnnnnnnnnnnnnnnnnnnnnnnnnnnnnnnnnnnnnnnnnnnnnnnnnnnnnnnnnnnnnnnnnnnnnnnnnnnnnnnnnnnnnnnnnnnnnnnnnnnnnnnnnnnnnnnnnnnnnnnnnnnnnnnnnnnnnnnnnnnnnnnnnnnnnnnnnnnnnnnnnnnnnnnnnnnnnnnnnnnnnnnnnnnnnnnnnnnnnnnnnnnnnnnnnnnnnnnnnnnnnnnnnnnnnnnnnnnnnnnnnnnnnnnnnnnnnnnnnnnnnnnnnnnnnnnnnnnnnnnnnnnnnnnnnnnnnnnnnnnnnnnnnnnnnnnnnnnnnnnnnnnnnnnnnnnnnnnnnnnnnnnnnnnnnnnnnnnnnnnnnnnnnnnnnnnnnnnnnnnnnnnnnnnnnnnnnnnnnnnnnnnnnnnnnnnnnnnnnnnnnnnnnnnnnnnnnnnnnnnnnnnnnnnnnnnnnnnnnnnnnnnnnnnnnnnnnnnnnnnnnnnnnnnnnnnnnnnnnnnnnnnnnnnnnnnnnnnnnnnnnnnnnnnnnnnnnnnnnnnnnnnnnnnnnnnnnnnnnnnnnnnnnnnnnnnnnnnnnnnnnnnnnnnnnnnnnnnnnnnnnnnnnnnnnnnnnnnnnnnnnnnnnnnnnnnnnnnnnnnnnnnnnnnnnnnnnnnnnnnnnnnnnnnnnnnnnnnnnnnnnnnnnnnnnnnnnnnnnnnnnnnnnnnnnnnnnnnnnnnnnnnnnnnnnnnnnnnnnnnnnnnnnnnnnnnnnnnnnnnnnnnnnnnnnnnnnnnnnnnnnnnnnnnnnnnnnnnnnnnnnnnnnnnnnnnnnnnnnnnnnnnnnnnnnnnnnnnnnnnnnnnnnnnnnnnnnnnnnnnnnnnnnnnnnnnnnnnnnnnnnnnnnnnnnnnnnnnnnnnnnnnnnnnnnnnnnnnnnnnnnnnnnnnnnnnnnnnnnnnnnnnnnnnnnnnnnnnnnnnnnnnnnnnnnnnnnnnnnnnnnnnnnnnnnnnnnnnnnnnnnnnnnnnnnnnnnnnnnnnnnnnnnnnnnnnnnnnnnnnnnnnnnnnnnnnnnnnnnnnnnnnnnnnnnnnnnnnnnnnnnnnnnnnnnnnnnnnnnnnnnnnnnnnnnnnnnnnnnnnnnnnnnnnnnnnnnnnnnnnnnnnnnnnnnnnnnnnnnnnnnnnnnnnnnnnnnnnnnnnnnnnnnnnnnnnnnnnnnnnnnnnnnnnnnnnnnnnnnnnnnnnnnnnnnnnnnnnnnnnnnnnnnnnnnnnnnnnnnnnnnnnnnnnnnnnnnnnnnnnnnnnnnnnnnnnnnnnnnnnnnnnnnnnnnnnnnnnnnnnnnnnnnnnnnnnnnnnnnnnnnnnnnnnnnnnnnnnnnnnnnnnnnnnnnnnnnnnnnnnnnnnnnnnnnnnnnnnnnnnnnnnnnnnnnnnnnnnnnnnnnnnnnnnnnnnnnnnnnnnnnnnnnnnnnnnnnnnnnnnnnnnnnnnnnnnnnnnnnnnnnnnnnnnnnnnnnnnnnnnnnnnnnnnnnnnnnnnnnnnnnnnnnnnnnnnnnnnnnnnnnnnnnnnnnnnnnnnnnnnnnnnnnnnnnnnnnnnnnnnnnnnnnnnnnnnnnnnnnnnnnnnnnnnnnnnnnnnnnnnnnnnnnnnnnnnnnnnnnnnnnnnnnnnnnnnnnnnnnnnnnnnnnnnnnnnnnnnnnnnnnnnnnnnnnnnnnnnnnnnnnnnnnnnnnnnnnnnnnnnnnnnnnnnnnnnnnnnnnnnnnnnnnnnnnnnnnnnnnnnnnnnnnnnnnnnnnnnnnnnnnnnnnnnnnnnnnnnnnnnnnnnnnnnnnnnnnnnnnnnnnnnnnnnnnnnnnnnnnnnnnnnnnnnnnnnnnnnnnnnnnnnnnnnnnnnnnnnnnnnnnnnnnnnnnnnnnnnnnnnnnnnnnnnnnnnnnnnnnnnnnnnnnnnnnnnnnnnnnnnnnnnnnnnnnnnnnnnnnnnnnnnnnnnnnnnnnnnnnnnnnnnnnnnnnnnnnnnnnnnnnnnnnnnnnnnnnnnnnnnnnnnnnnnnnnnnnnnnnnnnnnnnnnnnnnnnnnnnnnnnnnnnnnnnnnnnnnnnnnnnnnnnnnnnnnnnnnnnnnnnnnnnnnnnnnnnnnnnnnnnnnnnnnnnnnnnnnnnnnnnnnnnnnnnnnnnnnnnnnnnnnnnnnnnnnnnnnnnnnnnnnnnnnnnnnnnnnnnnnnnnnnnnnnnnnnnnnnnnnnnnnnnnnnnnnnnnnnnnnnnnnnnnnnnnnnnnnnnnnnnnnnnnnnnnnnnnnnnnnnnnnnnnnnnnnnnnnnnnnnnnnnnnnnnnnnnnnnnnnnnnnnnnnnnnnnnnnnnnnnnnnnnnnnnnnnnnnnnnnnnnnnnnnnnnnnnnnnnnnnnnnnnnnnnnnnnnnnnnnnnnnnnnnnnnnnnnnnnnnnnnnnnnnnnnnnnnnnnnnnnnnnnnnnnnnnnnnnnnnnnnnnnnnnnnnnnnnnnnnnnnnnnnnnnnnnnnnnnnnnnnnnnnnnnnnnnnnnnnnnnnnnnnnnnnnnnnnnnnnnnnnnnnnnnnnnnnnnnnnnnnnnnnnnnnnnnnnnnnnnnnnnnnnnnnnnnnnnnnnnnnnnnnnnnnnnnnnnnnnnnnnnnnnnnnnnnnnnnnnnnnnnnnnnnnnnnnnnnnnnnnnnnnnnnnnnnnnnnnnnnnnnnnnnnnnnnnnnnnnnnnnnnnnnnnnnnnnnnnnnnnnnnnnnnnnnnnnnnnnnnnnnnnnnnnnnnnnnnnnnnnnnnnnnnnnnnnnnnnnnnnnnnnnnnnnnnnnnnnnnnnnnnnnnnnnnnnnnnnnnnnnnnnnnnnnnnnnnnnnnnnnnnnnnnnnnnnnnnnnnnnnnnnnnnnnnnnnnnnnnnnnnnnnnnnnnnnnnnnnnnnnnnnnnnnnnnnnnnnnnnnnnnnnnnnnnnnnnnnnnnnnnnnnnnnnnnnnnnnnnnnnnnnnnnnnnnnnnnnnnnnnnnnnnnnnnnnnnnnnnnnnnnnnnnnnnnnnnnnnnnnnnnnnnnnnnnnnnnnnnnnnnnnnnnnnnnnnnnnnnnnnnnnnnnnnnnnnnnnnnnnnnnnnnnnnnnnnnnnnnnnnnnnnnnnnnnnnnnnnnnnnnnnnnnnnnnnnnnnnnnnnnnnnnnnnnnnnnnnnnnnnnnnnnnnnnnnnnnnnnnnnnnnnnnnnnnnnnnnnnnnnnnnnnnnnnnnnnnnnnnnnnnnnnnnnnnnnnnnnnnnnnnnnnnnnnnnnnnnnnnnnnnnnnnnnnnnnnnnnnnnnnnnnnnnnnnnnnnnnnnnnnnnnnnnnnnnnnnnnnnnnnnnnnnnnnnnnnnnnnnnnnnnnnnnnnnnnnnnnnnnnnnnnnnnnnnnnnnnnnnnnnnnnnnnnnnnnnnnnnnnnnnnnnnnnnnnnnnnnnnnnnnnnnnnnnnnnnnnnnnnnnnnnnnnnnnnnnnnnnnnnnnnnnnnnnnnnnnnnnnnnnnnnnnnnnnnnnnnnnnnnnnnnnnnnnnnnnnnnnnnnnnnnnnnnnnnnnnnnnnnnnnnnnnnnnnnnnnnnnnnnnnnnnnnnnnnnnnnnnnnnnnnnnnnnnnnnnnnnnnnnnnnnnnnnnnnnnnnnnnnnnnnnnnnnnnnnnnnnnnnnnnnnnnnnnnnnnnnnnnnnnnnnnnnnnnnnnnnnnnnnnnnnnnnnnnnnnnnnnnnnnnnnnnnnnnnnnnnnnnnnnnnnnnnnnnnnnnnnnnnnnnnnnnnnnnnnnnnnnnnnnnnnnnnnnnnnnnnnnnnnnnnnnnnnnnnnnnnnnnnnnnnnnnnnnnnnnnnnnnnnnnnnnnnnnnnnnnnnnnnnnnnnnnnnnnnnnnnnnnnnnnnnnnnnnnnnnnnnnnnnnnnnnnnnnnnnnnnnnnnnnnnnnnnnnnnnnnnnnnnnnnnnnnnnnnnnnnnnnnnnnnnnnnnnnnnnnnnnnnnnnnnnnnnnnnnnnnnnnnnnnnnnnnnnnnnnnnnnnnnnnnnnnnnnnnnnnnnnnnnnnnnnnnnnnnnnnnnnnnnnnnnnnnnnnnnnnnnnnnnnnnnnnnnnnnnnnnnnnnnnnnnnnnnnnnnnnnnnnnnnnnnnnnnnnnnnnnnnnnnnnnnnnnnnnnnnnnnnnnnnnnnnnnnnnnnnnnnnnnnnnnnnnnnnnnnnnnnnnnnnnnnnnnnnnnnnnnnnnnnnnnnnnnnnnnnnnnnnnnnnnnnnnnnnnnnnnnnnnnnnnnnnnnnnnnnnnnnnnnnnnnnnnnnnnnnnnnnnnnnnnnnnnnnnnnnnnnnnnnnnnnnnnnnnnnnnnnnnnnnnnnnnnnnnnnnnnnnnnnnnnnnnnnnnnnnnnnnnnnnnnnnnnnnnnnnnnnnnnnnnnnnnnnnnnnnnnnnnnnnnnnnnnnnnnnnnnnnnnnnnnnnnnnnnnnnnnnnnnnnnnnnnnnnnnnnnnnnnnnnnnnnnnnnnnnnnnnnnnnnnnnnnnnnnnnnnnnnnnnnnnnnnnnnnnnnnnnnnnnnnnnnnnnnnnnnnnnnnnnnnnnnnnnnnnnnnnnnnnnnnnnnnnnnnnnnnnnnnnnnnnnnnnnnnnnnnnnnnnnnnnnnnnnnnnnnnnnnnnnnnnnnnnnnnnnnnnnnnnnnnnnnnnnnnnnnnnnnnnnnnnnnnnnnnnnnnnnnnnnnnnnnnnnnnnnnnnnnnnnnnnnnnnnnnnnnnnnnnnnnnnnnnnnnnnnnnnnnnnnnnnnnnnnnnnnnnnnnnnnnnnnnnnnnnnnnnnnnnnnnnnnnnnnnnnnnnnnnnnnnnnnnnnnnnnnnnnnnnnnnnnnnnnnnnnnnnnnnnnnnnnnnnnnnnnnnnnnnnnnnnnnnnnnnnnnnnnnnnnnnnnnnnnnnnnnnnnnnnnnnnnnnnnnnnnnnnnnnnnnnnnnnnnnnnnnnnnnnnnnnnnnnnnnnnnnnnnnnnnnnnnnnnnnnnnnnnnnnnnnnnnnnnnnnnnnnnnnnnnnnnnnnnnnnnnnnnnnnnnnnnnnnnnnnnnnnnnnnnnnnnnnnnnnnnnnnnnnnnnnnnnnnnnnnnnnnnnnnnnnnnnnnnnnnnnnnnnnnnnnnnnnnnnnnnnnnnnnnnnnnnnnnnnnnnnnnnnnnnnnnnnnnnnnnnnnnnnnnnnnnnnnnnnnnnnnnnnnnnnnnnnnnnnnnnnnnnnnnnnnnnnnnnnnnnnnnnnnnnnnnnnnnnnnnnnnnnnnnnnnnnnnnnnnnnnnnnnnnnnnnnnnnnnnnnnnnnnnnnnnnnnnnnnnnnnnnnnnnnnnnnnnnnnnnnnnnnnnnnnnnnnnnnnnnnnnnnnnnnnnnnnnnnnnnnnnnnnnnnnnnnnnnnnnnnnnnnnnnnnnnnnnnnnnnnnnnnnnnnnnnnnnnnnnnnnnnnnnnnnnnnnnnnnnnnnnnnnnnnnnnnnnnnnnnnnnnnnnnnnnnnnnnnnnnnnnnnnnnnnnnnnnnnnnnnnnnnnnnnnnnnnnnnnnnnnnnnnnnnnnnnnnnnnnnnnnnnnnnnnnnnnnnnnnnnnnnnnnnnnnnnnnnnnnnnnnnnnnnnnnnnnnnnnnnnnnnnnnnnnnnnnnnnnnnnnnnnnnnnnnnnnnnnnnnnnnnnnnnnnnnnnnnnnnnnnnnnnnnnnnnnnnnnnnnnnnnnnnnnnnnnnnnnnnnnnnnnnnnnnnnnnnnnnnnnnnnnnnnnnnnnnnnnnnnnnnnnnnnnnnnnnnnnnnnnnnnnnnnnnnnnnnnnnnnnnnnnnnnnnnnnnnnnnnnnnnnnnnnnnnnnnnnnnnnnnnnnnnnnnnnnnnnnnnnnnnnnnnnnnnnnnnnnnnnnnnnnnnnnnnnnnnnnnnnnnnnnnnnnnnnnnnnnnnnnnnnnnnnnnnnnnnnnnnnnnnnnnnnnnnnnnnnnnnnnnnnnnnnnnnnnnnnnnnnnnnnnnnnnnnnnnnnnnnnnnnnnnnnnnnnnnnnnnnnnnnnnnnnnnnnnnnnnnnnnnnnnnnnnnnnnnnnnnnnnnnnnnnnnnnnnnnnnnnnnnnnnnnnnnnnnnnnnnnnnnnnnnnnnnnnnnnnnnnnnnnnnnnnnnnnnnnnnnnnnnnnnnnnnnnnnnnnnnnnnnnnnnnnnnnnnnnnnnnnnnnnnnnnnnnnnnnnnnnnnnnnnnnnnnnnnnnnnnnnnnnnnnnnnnnnnnnnnnnnnnnnnnnnnnnnnnnnnnnnnnnnnnnnnnnnnnnnnnnnnnnnnnnnnnnnnnnnnnnnnnnnnnnnnnnnnnnnnnnnnnnnnnnnnnnnnnnnnnnnnnnnnnnnnnnnnnnnnnnnnnnnnnnnnnnnnnnnnnnnnnnnnnnnnnnnnnnnnnnnnnnnnnnnnnnnnnnnnnnnnnnnnnnnnnnnnnnnnnnnnnnnnnnnnnnnnnnnnnnnnnnnnnnnnnnnnnnnnnnnnnnnnnnnnnnnnnnnnnnnnnnnnnnnnnnnnnnnnnnnnnnnnnnnnnnnnnnnnnnnnnnnnnnnnnnnnnnnnnnnnnnnnnnnnnnnnnnnnnnnnnnnnnnnnnnnnnnnnnnnnnnnnnnnnnnnnnnnnnnnnnnnnnnnnnnnnnnnnnnnnnnnnnnnnnnnnnnnnnnnnnnnnnnnnnnnnnnnnnnnnnnnnnnnnnnnnnnnnnnnnnnnnnnnnnnnnnnnnnnnnnnnnnnnnnnnnnnnnnnnnnnnnnnnnnnnnnnnnnnnnnnnnnnnnnnnnnnnnnnnnnnnnnnnnnnnnnnnnnnnnnnnnnnnnnnnnnnnnnnnnnnnnnnnnnnnnnnnnnnnnnnnnnnnnnnnnnnnnnnnnnnnnnnnnnnnnnnnnnnnnnnnnnnnnnnnnnnnnnnnnnnnnnnnnnnnnnnnnnnnnnnnnnnnnnnnnnnnnnnnnnnnnnnnnnnnnnnnnnnnnnnnnnnnnnnnnnnnnnnnnnnnnnnnnnnnnnnnnnnnnnnnnnnnnnnnnnnnnnnnnnnnnnnnnnnnnnnnnnnnnnnnnnnnnnnnnnnnnnnnnnnnnnnnnnnnnnnnnnnnnnnnnnnnnnnnnnnnnnnnnnnnnnnnnnnnnnnnnnnnnnnnnnnnnnnnnnnnnnnnnnnnnnnnnnnnnnnnnnnnnnnnnnnnnnnnnnnnnnnnnnnnnnnnnnnnnnnnnnnnnnnnnnnnnnnnnnnnnnnnnnnnnnnnnnnnnnnnnnnnnnnnnnnnnnnnnnnnnnnnnnnnnnnnnnnnnnnnnnnnnnnnnnnnnnnnnnnnnnnnnnnnnnnnnnnnnnnnnnnnnnnnnnnnnnnnnnnnnnnnnnnnnnnnnnnnnnnnnnnnnnnnnnnnnnnnnnnnnnnnnnnnnnnnnnnnnnnnnnnnnnnnnnnnnnnnnnnnnnnnnnnnnnnnnnnnnnnnnnnnnnnnnnnnnnnnnnnnnnnnnnnnnnnnnnnnnnnnnnnnnnnnnnnnnnnnnnnnnnnnnnnnnnnnnnnnnnnnnnnnnnnnnnnnnnnnnnnnnnnnnnnnnnnnnnnnnnnnnnnnnnnnnnnnnnnnnnnnnnnnnnnnnnnnnnnnnnnnnnnnnnnnnnnnnnnnnnnnnnnnnnnnnnnnnnnnnnnnnnnnnnnnnnnnnnnnnnnnnnnnnnnnnnnnnnnnnnnnnnnnnnnnnnnnnnnnnnnnnnnnnnnnnnnnnnnnnnnnnnnnnnnnnnnnnnnnnnnnnnnnnnnnnnnnnnnnnnnnnnnnnnnnnnnnnnnnnnnnnnnnnnnnnnnnnnnnnnnnnnnnnnnnnnnnnnnnnnnnnnnnnnnnnnnnnnnnnnnnnnnnnnnnnnnnnnnnnnnnnnnnnnnnnnnnnnnnnnnnnnnnnnnnnnnnnnnnnnnnnnnnnnnnnnnnnnnnnnnnnnnnnnnnnnnnnnnnnnnnnnnnnnnnnnnnnnnnnnnnnnnnnnnnnnnnnnnnnnnnnnnnnnnnnnnnnnnnnnnnnnnnnnnnnnnnnnnnnnnnnnnnnnnnnnnnnnnnnnnnnnnnnnnnnnnnnnnnnnnnnnnnnnnnnnnnnnnnnnnnnnnnnnnnnnnnnnnnnnnnnnnnnnnnnnnnnnnnnnnnnnnnnnnnnnnnnnnnnnnnnnnnnnnnnnnnnnnnnnnnnnnnnnnnnnnnnnnnnnnnnnnnnnnnnnnnnnnnnnnnnnnnnnnnnnnnnnnnnnnnnnnnnnnnnnnnnnnnnnnnnnnnnnnnnnnnnnnnnnnnnnnnnnnnnnnnnnnnnnnnnnnnnnnnnnnnnnnnnnnnnnnnnnnnnnnnnnnnnnnnnnnnnnnnnnnnnnnnnnnnnnnnnnnnnnnnnnnnnnnnnnnnnnnnnnnnnnnnnnnnnnnnnnnnnnnnnnnnnnnnnnnnnnnnnnnnnnnnnnnnnnnnnnnnnnnnnnnnnnnnnnnnnnnnnnnnnnnnnnnnnnnnnnnnnnnnnnnnnnnnnnnnnnnnnnnnnnnnnnnnnnnnnnnnnnnnnnnnnnnnnnnnnnnnnnnnnnnnnnnnnnnnnnnnnnnnnnnnnnnnnnnnnnnnnnnnnnnnnnnnnnnnnnnnnnnnnnnnnnnnnnnnnnnnnnnnnnnnnnnnnnnnnnnnnnnnnnnnnnnnnnnnnnnnnnnnnnnnnnnnnnnnnnnnnnnnnnnnnnnnnnnnnnnnnnnnnnnnnnnnnnnnnnnnnnnnnnnnnnnnnnnnnnnnnnnnnnnnnnnnnnnnnnnnnnnnnnnnnnnnnnnnnnnnnnnnnnnnnnnnnnnnnnnnnnnnnnnnnnnnnnnnnnnnnnnnnnnnnnnnnnnnnnnnnnnnnnnnnnnnnnnnnnnnnnnnnnnnnnnnnnnnnnnnnnnnnnnnnnnnnnnnnnnnnnnnnnnnnnnnnnnnnnnnnnnnnnnnnnnnnnnnnnnnnnnnnnnnnnnnnnnnnnnnnnnnnnnnnnnnnnnnnnnnnnnnnnnnnnnnnnnnnnnnnnnnnnnnnnnnnnnnnnnnnnnnnnnnnnnnnnnnnnnnnnnnnnnnnnnnnnnnnnnnnnnnnnnnnnnnnnnnnnnnnnnnnnnnnnnnnnnnnnnnnnnnnnnnnnnnnnnnnnnnnnnnnnnnnnnnnnnnnnnnnnnnnnnnnnnnnnnnnnnnnnnnnnnnnnnnnnnnnnnnnnnnnnnnnnnnnnnnnnnnnnnnnnnnnnnnnnnnnnnnnnnnnnnnnnnnnnnnnnnnnnnnnnnnnnnnnnnnnnnnnnnnnnnnnnnnnnnnnnnnnnnnnnnnnnnnnnnnnnnnnnnnnnnnnnnnnnnnnnnnnnnnnnnnnnnnnnnnnnnnnnnnnnnnnnnnnnnnnnnnnnnnnnnnnnnnnnnnnnnnnnnnnnnnnnnnnnnnnnnnnnnnnnnnnnnnnnnnnnnnnnnnnnnnnnnnnnnnnnnnnnnnnnnnnnnnnnnnnnnnnnnnnnnnnnnnnnnnnnnnnnnnnnnnnnnnnnnnnnnnnnnnnnnnnnnnnnnnnnnnnnnnnnnnnnnnnnnnnnnnnnnnnnnnnnnnnnnnnnnnnnnnnnnnnnnnnnnnnnnnnnnnnnnnnnnnnnnnnnnnnnnnnnnnnnnnnnnnnnnnnnnnnnnnnnnnnnnnnnnnnnnnnnnnnnnnnnnnnnnnnnnnnnnnnnnnnnnnnnnnnnnnnnnnnnnnnnnnnnnnnnnnnnnnnnnnnnnnnnnnnnnnnnnnnnnnnnnnnnnnnnnnnnnnnnnnnnnnnnnnnnnnnnnnnnnnnnnnnnnnnnnnnnnnnnnnnnnnnnnnnnnnnnnnnnnnnnnnnnnnnnnnnnnnnnnnnnnnnnnnnnnnnnnnnnnnnnnnnnnnnnnnnnnnnnnnnnnnnnnnnnnnnnnnnnnnnnnnnnnnnnnnnnnnnnnnnnnnnnnnnnnnnnnnnnnnnnnnnnnnnnnnnnnnnnnnnnnnnnnnnnnnnnnnnnnnnnnnnnnnnnnnnnnnnnnnnnnnnnnnnnnnnnnnnnnnnnnnnnnnnnnnnnnnnnnnnnnnnnnnnnnnnnnnnnnnnnnnnnnnnnnnnnnnnnnnnnnnnnnnnnnnnnnnnnnnnnnnnnnnnnnnnnnnnnnnnnnnnnnnnnnnnnnnnnnnnnnnnnnnnnnnnnnnnnnnnnnnnnnnnnnnnnnnnnnnnnnnnnnnnnnnnnnnnnnnnnnnnnnnnnnnnnnnnnnnnnnnnnnnnnnnnnnnnnnnnnnnnnnnnnnnnnnnnnnnnnnnnnnnnnnnnnnnnnnnnnnnnnnnnnnnnnnnnnnnnnnnnnnnnnnnnnnnnnnnnnnnnnnnnnnnnnnnnnnnnnnnnnnnnnnnnnnnnnnnnnnnnnnnnnnnnnnnnnnnnnnnnnnnnnnnnnnnnnnnnnnnnnnnnnnnnnnnnnnnnnnnnnnnnnnnnnnnnnnnnnnnnnnnnnnnnnnnnnnnnnnnnnnnnnnnnnnnnnnnnnnnnnnnnnnnnnnnnnnnnnnnnnnnnnnnnnnnnnnnnnnnnnnnnnnnnnnnnnnnnnnnnnnnnnnnnnnnnnnnnnnnnnnnnnnnnnnnnnnnnnnnnnnnnnnnnnnnnnnnnnnnnnnnnnnnnnnnnnnnnnnnnnnnnnnnnnnnnnnnnnnnnnnnnnnnnnnnnnnnnnnnnnnnnnnnnnnnnnnnnnnnnnnnnnnnnnnnnnnnnnnnnnnnnnnnnnnnnnnnnnnnnnnnnnnnnnnnnnnnnnnnnnnnnnnnnnnnnnnnnnnnnnnnnnnnnnnnnnnnnnnnnnnnnnnnnnnnnnnnnnnnnnnnnnnnnnnnnnnnnnnnnnnnnnnnnnnnnnnnnnnnnnnnnnnnnnnnnnnnnnnnnnnnnnnnnnnnnnnnnnnnnnnnnnnnnnnnnnnnnnnnnnnnnnnnnnnnnnnnnnnnnnnnnnnnnnnnnnnnnnnnnnnnnnnnnnnnnnnnnnnnnnnnnnnnnnnnnnnnnnnnnnnnnnnnnnnnnnnnnnnnnnnnnnnnnnnnnnnnnnnnnnnnnnnnnnnnnnnnnnnnnnnnnnnnnnnnnnnnnnnnnnnnnnnnnnnnnnnnnnnnnnnnnnnnnnnnnnnnnnnnnnnnnnnnnnnnnnnnnnnnnnnnnnnnnnnnnnnnnnnnnnnnnnnnnnnnnnnnnnnnnnnnnnnnnnnnnnnnnnnnnnnnnnnnnnnnnnnnnnnnnnnnnnnnnnnnnnnnnnnnnnnnnnnnnnnnnnnnnnnnnnnnnnnnnnnnnnnnnnnnnnnnnnnnnnnnnnnnnnnnnnnnnnnnnnnnnnnnnnnnnnnnnnnnnnnnnnnnnnnnnnnnnnnnnnnnnnnnnnnnnnnnnnnnnnnnnnnnnnnnnnnnnnnnnnnnnnnnnnnnnnnnnnnnnnnnnnnnnnnnnnnnnnnnnnnnnnnnnnnnnnnnnnnnnnnnnnnnnnnnnnnnnnnnnnnnnnnnnnnnnnnnnnnnnnnnnnnnnnnnnnnnnnnnnnnnnnnnnnnnnnnnnnnnnnnnnnnnnnnnnnnnnnnnnnnnnnnnnnnnnnnnnnnnnnnnnnnnnnnnnnnnnnnnnnnnnnnnnnnnnnnnnnnnnnnnnnnnnnnnnnnnnnnnnnnnnnnnnnnnnnnnnnnnnnnnnnnnnnnnnnnnnnnnnnnnnnnnnnnnnnnnnnnnnnnnnnnnnnnnnnnnnnnnnnnnnnnnnnnnnnnnnnnnnnnnnnnnnnnnnnnnnnnnnnnnnnnnnnnnnnnnnnnnnnnnnnnnnnnnnnnnnnnnnnnnnnnnnnnnnnnnnnnnnnnnnnnnnnnnnnnnnnnnnnnnnnnnnnnnnnnnnnnnnnnnnnnnnnnnnnnnnnnnnnnnnnnnnnnnnnnnnnnnnnnnnnnnnnnnnnnnnnnnnnnnnnnnnnnnnnnnnnnnnnnnnnnnnnnnnnnnnnnnnnnnnnnnnnnnnnnnnnnnnnnnnnnnnnnnnnnnnnnnnnnnnnnnnnnnnnnnnnnnnnnnnnnnnnnnnnnnnnnnnnnnnnnnnnnnnnnnnnnnnnnnnnnnnnnnnnnnnnnnnnnnnnnnnnnnnnnnnnnnnnnnnnnnnnnnnnnnnnnnnnnnnnnnnnnnnnnnnnnnnnnnnnnnnnnnnnnnnnnnnnnnnnnnnnnnnnnnnnnnnnnnnnnnnnnnnnnnnnnnnnnnnnnnnnnnnnnnnnnnnnnnnnnnnnnnnnnnnnnnnnnnnnnnnnnnnnnnnnnnnnnnnnnnnnnnnnnnnnnnnnnnnnnnnnnnnnnnnnnnnnnnnnnnnnnnnnnnnnnnnnnnnnnnnnnnnnnnnnnnnnnnnnnnnnnnnnnnnnnnnnnnnnnnnnnnnnnnnnnnnnnnnnnnnnnnnnnnnnnnnnnnnnnnnnnnnnnnnnnnnnnnnnnnnnnnnnnnnnnnnnnnnnnnnnnnnnnnnnnnnnnnnnnnnnnnnnnnnnnnnnnnnnnnnnnnnnnnnnnnnnnnnnnnnnnnnnnnnnnnnnnnnnnnnnnnnnnnnnnnnnnnnnnnnnnnnnnnnnnnnnnnnnnnnnnnnnnnnnnnnnnnnnnnnnnnnnnnnnnnnnnnnnnnnnnnnnnnnnnnnnnnnnnnnnnnnnnnnnnnnnnnnnnnnnnnnnnnnnnnnnnnnnnnnnnnnnnnnnnnnnnnnnnnnnnnnnnnnnnnnnnnnnnnnnnnnnnnnnnnnnnnnnnnnnnnnnnnnnnnnnnnnnnnnnnnnnnnnnnnnnnnnnnnnnnnnnnnnnnnnnnnnnnnnnnnnnnnnnnnnnnnnnnnnnnnnnnnnnnnnnnnnnnnnnnnnnnnnnnnnnnnnnnnnnnnnnnnnnnnnnnnnnnnnnnnnnnnnnnnnnnnnnnnnnnnnnnnnnnnnnnnnnnnnnnnnnnnnnnnnnnnnnnnnnnnnnnnnnnnnnnnnnnnnnnnnnnnnnnnnnnnnnnnnnnnnnnnnnnnnnnnnnnnnnnnnnnnnnnnnnnnnnnnnnnnnnnnnnnnnnnnnnnnnnnnnnnnnnnnnnnnnnnnnnnnnnnnnnnnnnnnnnnnnnnnnnnnnnnnnnnnnnnnnnnnnnnnnnnnnnnnnnnnnnnnnnnnnnnnnnnnnnnnnnnnnnnnnnnnnnnnnnnnnnnnnnnnnnnnnnnnnnnnnnnnnnnnnnnnnnnnnnnnnnnnnnnnnnnnnnnnnnnnnnnnnnnnnnnnnnnnnnnnnnnnnnnnnnnnnnnnnnnnnnnnnnnnnnnnnnnnnnnnnnnnnnnnnnnnnnnnnnnnnnnnnnnnnnnnnnnnnnnnnnnnnnnnnnnnnnnnnnnnnnnnnnnnnnnnnnnnnnnnnnnnnnnnnnnnnnnnnnnnnnnnnnnnnnnnnnnnnnnnnnnnnnnnnnnnnnnnnnnnnnnnnnnnnnnnnnnnnnnnnnnnnnnnnnnnnnnnnnnnnnnnnnnnnnnnnnnnnnnnnnnnnnnnnnnnnnnnnnnnnnnnnnnnnnnnnnnnnnnnnnnnnnnnnnnnnnnnnnnnnnnnnnnnnnnnnnnnnnnnnnnnnnnnnnnnnnnnnnnnnnnnnnnnnnnnnnnnnnnnnnnnnnnnnnnnnnnnnnnnnnnnnnnnnnnnnnnnnnnnnnnnnnnnnnnnnnnnnnnnnnnnnnnnnnnnnnnnnnnnnnnnnnnnnnnnnnnnnnnnnnnnnnnnnnnnnnnnnnnnnnnnnnnnnnnnnnnnnnnnnnnnnnnnnnnnnnnnnnnnnnnnnnnnnnnnnnnnnnnnnnnnnnnnnnnnnnnnnnnnnnnnnnnnnnnnnnnnnnnnnnnnnnnnnnnnnnnnnnnnnnnnnnnnnnnnnnnnnnnnnnnnnnnnnnnnnnnnnnnnnnnnnnnnnnnnnnnnnnnnnnnnnnnnnnnnnnnnnnnnnnnnnnnnnnnnnnnnnnnnnnnnnnnnnnnnnnnnnnnnnnnnnnnnnnnnnnnnnnnnnnnnnnnnnnnnnnnnnnnnnnnnnnnnnnnnnnnnnnnnnnnnnnnnnnnnnnnnnnnnnnnnnnnnnnnnnnnnnnnnnnnnnnnnnnnnnnnnnnnnnnnnnnnnnnnnnnnnnnnnnnnnnnnnnnnnnnnnnnnnnnnnnnnnnnnnnnnnnnnnnnnnnnnnnnnnnnnnnnnnnnnnnnnnnnnnnnnnnnnnnnnnnnnnnnnnnnnnnnnnnnnnnnnnnnnnnnnnnnnnnnnnnnnnnnnnnnnnnnnnnnnnnnnnnnnnnnnnnnnnnnnnnnnnnnnnnnnnnnnnnnnnnnnnnnnnnnnnnnnnnnnnnnnnnnnnnnnnnnnnnnnnnnnnnnnnnnnnnnnnnnnnnnnnnnnnnnnnnnnnnnnnnnnnnnnnnnnnnnnnnnnnnnnnnnnnnnnnnnnnnnnnnnnnnnnnnnnnnnnnnnnnnnnnnnnnnnnnnnnnnnnnnnnnnnnnnnnnnnnnnnnnnnnnnnnnnnnnnnnnnnnnnnnnnnnnnnnnnnnnnnnnnnnnnnnnnnnnnnnnnnnnnnnnnnnnnnnnnnnnnnnnnnnnnnnnnnnnnnnnnnnnnnnnnnnnnnnnnnnnnnnnnnnnnnnnnnnnnnnnnnnnnnnnnnnnnnnnnnnnnnnnnnnnnnnnnnnnnnnnnnnnnnnnnnnnnnnnnnnnnnnnnnnnnnnnnnnnnnnnnnnnnnnnnnnnnnnnnnnnnnnnnnnnnnnnnnnnnnnnnnnnnnnnnnnnnnnnnnnnnnnnnnnnnnnnnnnnnnnnnnnnnnnnnnnnnnnnnnnnnnnnnnnnnnnnnnnnnnnnnnnnnnnnnnnnnnnnnnnnnnnnnnnnnnnnnnnnnnnnnnnnnnnnnnnnnnnnnnnnnnnnnnnnnnnnnnnnnnnnnnnnnnnnnnnnnnnnnnnnnnnnnnnnnnnnnnnnnnnnnnnnnnnnnnnnnnnnnnnnnnnnnnnnnnnnnnnnnnnnnnnnnnnnnnnnnnnnnnnnnnnnnnnnnnnnnnnnnnnnnnnnnnnnnnnnnnnnnnnnnnnnnnnnnnnnnnnnnnnnnnnnnnnnnnnnnnnnnnnnnnnnnnnnnnnnnnnnnnnnnnnnnnnnnnnnnnnnnnnnnnnnnnnnnnnnnnnnnnnnnnnnnnnnnnnnnnnnnnnnnnnnnnnnnnnnnnnnnnnnnnnnnnnnnnnnnnnnnnnnnnnnnnnnnnnnnnnnnnnnnnnnnnnnnnnnnnnnnnnnnnnnnnnnnnnnnnnnnnnnnnnnnnnnnnnnnnnnnnnnnnnnnnnnnnnnnnnnnnnnnnnnnnnnnnnnnnnnnnnnnnnnnnnnnnnnnnnnnnnnnnnnnnnnnnnnnnnnnnnnnnnnnnnnnnnnnnnnnnnnnnnnnnnnnnnnnnnnnnnnnnnnnnnnnnnnnnnnnnnnnnnnnnnnnnnnnnnnnnnnnnnnnnnnnnnnnnnnnnnnnnnnnnnnnnnnnnnnnnnnnnnnnnnnnnnnnnnnnnnnnnnnnnnnnnnnnnnnnnnnnnnnnnnnnnnnnnnnnnnnnnnnnnnnnnnnnnnnnnnnnnnnnnnnnnnnnnnnnnnnnnnnnnnnnnnnnnnnnnnnnnnnnnnnnnnnnnnnnnnnnnnnnnnnnnnnnnnnnnnnnnnnnnnnnnnnnnnnnnnnnnnnnnnnnnnnnnnnnnnnnnnnnnnnnnnnnnnnnnnnnnnnnnnnnnnnnnnnnnnnnnnnnnnnnnnnnnnnnnnnnnnnnnnnnnnnnnnnnnnnnnnnnnnnnnnnnnnnnnnnnnnnnnnnnnnnnnnnnnnnnnnnnnnnnnnnnnnnnnnnnnnnnnnnnnnnnnnnnnnnnnnnnnnnnnnnnnnnnnnnnnnnnnnnnnnnnnnnnnnnnnnnnnnnnnnnnnnnnnnnnnnnnnnnnnnnnnnnnnnnnnnnnnnnnnnnnnnnnnnnnnnnnnnnnnnnnnnnnnnnnnnnnnnnnnnnnnnnnnnnnnnnnnnnnnnnnnnnnnnnnnnnnnnnnnnnnnnnnnnnnnnnnnnnnnnnnnnnnnnnnnnnnnnnnnnnnnnnnnnnnnnnnnnnnnnnnnnnnnnnnnnnnnnnnnnnnnnnnnnnnnnnnnnnnnnnnnnnnnnnnnnnnnnnnnnnnnnnnnnnnnnnnnnnnnnnnnnnnnnnnnnnnnnnnnnnnnnnnnnnnnnnnnnnnnnnnnnnnnnnnnnnnnnnnnnnnnnnnnnnnnnnnnnnnnnnnnnnnnnnnnnnnnnnnnnnnnnnnnnnnnnnnnnnnnnnnnnnnnnnnnnnnnnnnnnnnnnnnnnnnnnnnnnnnnnnnnnnnnnnnnnnnnnnnnnnnnnnnnnnnnnnnnnnnnnnnnnnnnnnnnnnnnnnnnnnnnnnnnnnnnnnnnnnnnnnnnnnnnnnnnnnnnnnnnnnnnnnnnnnnnnnnnnnnnnnnnnnnnnnnnnnnnnnnnnnnnnnnnnnnnnnnnnnnnnnnnnnnnnnnnnnnnnnnnnnnnnnnnnnnnnnnnnnnnnnnnnnnnnnnnnnnnnnnnnnnnnnnnnnnnnnnnnnnnnnnnnnnnnnnnnnnnnnnnnnnnnnnnnnnnnnnnnnnnnnnnnnnnnnnnnnnnnnnnnnnnnnnnnnnnnnnnnnnnnnnnnnnnnnnnnnnnnnnnnnnnnnnnnnnnnnnnnnnnnnnnnnnnnnnnnnnnnnnnnnnnnnnnnnnnnnnnnnnnnnnnnnnnnnnnnnnnnnnnnnnnnnnnnnnnnnnnnnnnnnnnnnnnnnnnnnnnnnnnnnnnnnnnnnnnnnnnnnnnnnnnnnnnnnnnnnnnnnnnnnnnnnnnnnnnnnnnnnnnnnnnnnnnnnnnnnnnnnnnnnnnnnnnnnnnnnnnnnnnnnnnnnnnnnnnnnnnnnnnnnnnnnnnnnnnnnnnnnnnnnnnnnnnnnnnnnnnnnnnnnnnnnnnnnnnnnnnnnnnnnnnnnnnnnnnnnnnnnnnnnnnnnnnnnnnnnnnnnnnnnnnnnnnnnnnnnnnnnnnnnnnnnnnnnnnnnnnnnnnnnnnnnnnnnnnnnnnnnnnnnnnnnnnnnnnnnnnnnnnnnnnnnnnnnnnnnnnnnnnnnnnnnnnnnnnnnnnnnnnnnnnnnnnnnnnnnnnnnnnnnnnnnnnnnnnnnnnnnnnnnnnnnnnnnnnnnnnnnnnnnnnnnnnnnnnnnnnnnnnnnnnnnnnnnnnnnnnnnnnnnnnnnnnnnnnnnnnnnnnnnnnnnnnnnnnnnnnnnnnnnnnnnnnnnnnnnnnnnnnnnnnnnnnnnnnnnnnnnnnnnnnnnnnnnnnnnnnnnnnnnnnnnnnnnnnnnnnnnnnnnnnnnnnnnnnnnnnnnnnnnnnnnnnnnnnnnnnnnnnnnnnnnnnnnnnnnnnnnnnnnnnnnnnnnnnnnnnnnnnnnnnnnnnnnnnnnnnnnnnnnnnnnnnnnnnnnnnnnnnnnnnnnnnnnnnnnnnnnnnnnnnnnnnnnnnnnnnnnnnnnnnnnnnnnnnnnnnnnnnnnnnnnnnnnnnnnnnnnnnnnnnnnnnnnnnnnnnnnnnnnnnnnnnnnnnnnnnnnnnnnnnnnnnnnnnnnnnnnnnnnnnnnnnnnnnnnnnnnnnnnnnnnnnnnnnnnnnnnnnnnnnnnnnnnnnnnnnnnnnnnnnnnnnnnnnnnnnnnnnnnnnnnnnnnnnnnnnnnnnnnnnnnnnnnnnnnnnnnnnnnnnnnnnnnnnnnnnnnnnnnnnnnnnnnnnnnnnnnnnnnnnnnnnnnnnnnnnnnnnnnnnnnnnnnnnnnnnnnnnnnnnnnnnnnnnnnnnnnnnnnnnnnnnnnnnnnnnnnnnnnnnnnnnnnnnnnnnnnnnnnnnnnnnnnnnnnnnnnnnnnnnnnnnnnnnnnnnnnnnnnnnnnnnnnnnnnnnnnnnnnnnnnnnnnnnnnnnnnnnnnnnnnnnnnnnnnnnnnnnnnnnnnnnnnnnnnnnnnnnnnnnnnnnnnnnnnnnnnnnnnnnnnnnnnnnnnnnnnnnnnnnnnnnnnnnnnnnnnnnnnnnnnnnnnnnnnnnnnnnnnnnnnnnnnnnnnnnnnnnnnnnnnnnnnnnnnnnnnnnnnnnnnnnnnnnnnnnnnnnnnnnnnnnnnnnnnnnnnnnnnnnnnnnnnnnnnnnnnnnnnnnnnnnnnnnnnnnnnnnnnnnnnnnnnnnnnnnnnnnnnnnnnnnnnnnnnnnnnnnnnnnnnnnnnnnnnnnnnnnnnnnnnnnnnnnnnnnnnnnnnnnnnnnnnnnnnnnnnnnnnnnnnnnnnnnnnnnnnnnnnnnnnnnnnnnnnnnnnnnnnnnnnnnnnnnnnnnnnnnnnnnnnnnnnnnnnnnnnnnnnnnnnnnnnnnnnnnnnnnnnnnnnnnnnnnnnnnnnnnnnnnnnnnnnnnnnnnnnnnnnnnnnnnnnnnnnnnnnnnnnnnnnnnnnnnnnnnnnnnnnnnnnnnnnnnnnnnnnnnnnnnnnnnnnnnnnnnnnnnnnnnnnnnnnnnnnnnnnnnnnnnnnnnnnnnnnnnnnnnnnnnnnnnnnnnnnnnnnnnnnnnnnnnnnnnnnnnnnnnnnnnnnnnnnnnnnnnnnnnnnnnnnnnnnnnnnnnnnnnnnnnnnnnnnnnnnnnnnnnnnnnnnnnnnnnnnnnnnnnnnnnnnnnnnnnnnnnnnnnnnnnnnnnnnnnnnnnnnnnnnnnnnnnnnnnnnnnnnnnnnnnnnnnnnnnnnnnnnnnnnnnnnnnnnnnnnnnnnnnnnnnnnnnnnnnnnnnnnnnnnnnnnnnnnnnnnnnnnnnnnnnnnnnnnnnnnnnnnnnnnnnnnnnnnnnnnnnnnnnnnnnnnnnnnnnnnnnnnnnnnnnnnnnnnnnnnnnnnnnnnnnnnnnnnnnnnnnnnnnnnnnnnnnnnnnnnnnnnnnnnnnnnnnnnnnnnnnnnnnnnnnnnnnnnnnnnnnnnnnnnnnnnnnnnnnnnnnnnnnnnnnnnnnnnnnnnnnnnnnnnnnnnnnnnnnnnnnnnnnnnnnnnnnnnnnnnnnnnnnnnnnnnnnnnnnnnnnnnnnnnnnnnnnnnnnnnnnnnnnnnnnnnnnnnnnnnnnnnnnnnnnnnnnnnnnnnnnnnnnnnnnnnnnnnnnnnnnnnnnnnnnnnnnnnnnnnnnnnnnnnnnnnnnnnnnnnnnnnnnnnnnnnnnnnnnnnnnnnnnnnnnnnnnnnnnnnnnnnnnnnnnnnnnnnnnnnnnnnnnnnnnnnnnnnnnnnnnnnnnnnnnnnnnnnnnnnnnnnnnnnnnnnnnnnnnnnnnnnnnnnnnnnnnnnnnnnnnnnnnnnnnnnnnnnnnnnnnnnnnnnnnnnnnnnnnnnnnnnnnnnnnnnnnnnnnnnnnnnnnnnnnnnnnnnnnnnnnnnnnnnnnnnnnnnnnnnnnnnnnnnnnnnnnnnnnnnnnnnnnnnnnnnnnnnnnnnnnnnnnnnnnnnnnnnnnnnnnnnnnnnnnnnnnnnnnnnnnnnnnnnnnnnnnnnnnnnnnnnnnnnnnnnnnnnnnnnnnnnnnnnnnnnnnnnnnnnnnnnnnnnnnnnnnnnnnnnnnnnnnnnnnnnnnnnnnnnnnnnnnnnnnnnnnnnnnnnnnnnnnnnnnnnnnnnnnnnnnnnnnnnnnnnnnnnnnnnnnnnnnnnnnnnnnnnnnnnnnnnnnnnnnnnnnnnnnnnnnnnnnnnnnnnnnnnnnnnnnnnnnnnnnnnnnnnnnnnnnnnnnnnnnnnnnnnnnnnnnnnnnnnnnnnnnnnnnnnnnnnnnnnnnnnnnnnnnnnnnnnnnnnnnnnnnnnnnnnnnnnnnnnnnnnnnnnnnnnnnnnnnnnnnnnnnnnnnnnnnnnnnnnnnnnnnnnnnnnnnnnnnnnnnnnnnnnnnnnnnnnnnnnnnnnnnnnnnnnnnnnnnnnnnnnnnnnnnnnnnnnnnnnnnnnnnnnnnnnnnnnnnnnnnnnnnnnnnnnnnnnnnnnnnnnnnnnnnnnnnnnnnnnnnnnnnnnnnnnnnnnnnnnnnnnnnnnnnnnnnnnnnnnnnnnnnnnnnnnnnnnnnnnnnnnnnnnnnnnnnnnnnnnnnnnnnnnnnnnnnnnnnnnnnnnnnnnnnnnnnnnnnnnnnnnnnnnnnnnnnnnnnnnnnnnnnnnnnnnnnnnnnnnnnnnnnnnnnnnnnnnnnnnnnnnnnnnnnnnnnnnnnnnnnnnnnnnnnnnnnnnnnnnnnnnnnnnnnnnnnnnnnnnnnnnnnnnnnnnnnnnnnnnnnnnnnnnnnnnnnnnnnnnnnnnnnnnnnnnnnnnnnnnnnnnnnnnnnnnnnnnnnnnnnnnnnnnnnnnnnnnnnnnnnnnnnnnnnnnnnnnnnnnnnnnnnnnnnnnnnnnnnnnnnnnnnnnnnnnnnnnnnnnnnnnnnnnnnnnnnnnnnnnnnnnnnnnnnnnnnnnnnnnnnnnnnnnnnnnnnnnnnnnnnnnnnnnnnnnnnnnnnnnnnnnnnnnnnnnnnnnnnnnnnnnnnnnnnnnnnnnnnnnnnnnnnnnnnnnnnnnnnnnnnnnnnnnnnnnnnnnnnnnnnnnnnnnnnnnnnnnnnnnnnnnnnnnnnnnnnnnnnnnnnnnnnnnnnnnnnnnnnnnnnnnnnnnnnnnnnnnnnnnnnnnnnnnnnnnnnnnnnnnnnnnnnnnnnnnnnnnnnnnnnnnnnnnnnnnnnnnnnnnnnnnnnnnnnnnnnnnnnnnnnnnnnnnnnnnnnnnnnnnnnnnnnnnnnnnnnnnnnnnnnnnnnnnnnnnnnnnnnnnnnnnnnnnnnnnnnnnnnnnnnnnnnnnnnnnnnnnnnnnnnnnnnnnnnnnnnnnnnnnnnnnnnnnnnnnnnnnnnnnnnnnnnnnnnnnnnnnnnnnnnnnnnnnnnnnnnnnnnnnnnnnnnnnnnnnnnnnnnnnnnnnnnnnnnnnnnnnnnnnnnnnnnnnnnnnnnnnnnnnnnnnnnnnnnnnnnnnnnnnnnnnnnnnnnnnnnnnnnnnnnnnnnnnnnnnnnnnnnnnnnnnnnnnnnnnnnnnnnnnnnnnnnnnnnnnnnnnnnnnnnnnnnnnnnnnnnnnnnnnnnnnnnnnnnnnnnnnnnnnnnnnnnnnnnnnnnnnnnnnnnnnnnnnnnnnnnnnnnnnnnnnnnnnnnnnnnnnnnnnnnnnnnnnnnnnnnnnnnnnnnnnnnnnnnnnnnnnnnnnnnnnnnnnnnnnnnnnnnnnnnnnnnnnnnnnnnnnnnnnnnnnnnnnnnnnnnnnnnnnnnnnnnnnnnnnnnnnnnnnnnnnnnnnnnnnnnnnnnnnnnnnnnnnnnnnnnnnnnnnnnnnnnnnnnnnnnnnnnnnnnnnnnnnnnnnnnnnnnnnnnnnnnnnnnnnnnnnnnnnnnnnnnnnnnnnnnnnnnnnnnnnnnnnnnnnnnnnnnnnnnnnnnnnnnnnnnnnnnnnnnnnnnnnnnnnnnnnnnnnnnnnnnnnnnnnnnnnnnnnnnnnnnnnnnnnnnnnnnnnnnnnnnnnnnnnnnnnnnnnnnnnnnnnnnnnnnnnnnnnnnnnnnnnnnnnnnnnnnnnnnnnnnnnnnnnnnnnnnnnnnnnnnnnnnnnnnnnnnnnnnnnnnnnnnnnnnnnnnnnnnnnnnnnnnnnnnnnnnnnnnnnnnnnnnnnnnnnnnnnnnnnnnnnnnnnnnnnnnnnnnnnnnnnnnnnnnnnnnnnnnnnnnnnnnnnnnnnnnnnnnnnnnnnnnnnnnnnnnnnnnnnnnnnnnnnnnnnnnnnnnnnnnnnnnnnnnnnnnnnnnnnnnnnnnnnnnnnnnnnnnnnnnnnnnnnnnnnnnnnnnnnnnnnnnnnnnnnnnnnnnnnnnnnnnnnnnnnnnnnnnnnnnnnnnnnnnnnnnnnnnnnnnnnnnnnnnnnnnnnnnnnnnnnnnnnnnnnnnnnnnnnnnnnnnnnnnnnnnnnnnnnnnnnnnnnnnnnnnnnnnnnnnnnnnnnnnnnnnnnnnnnnnnnnnnnnnnnnnnnnnnnnnnnnnnnnnnnnnnnnnnnnnnnnnnnnnnnnnnnnnnnnnnnnnnnnnnnnnnnnnnnnnnnnnnnnnnnnnnnnnnnnnnnnnnnnnnnnnnnnnnnnnnnnnnnnnnnnnnnnnnnnnnnnnnnnnnnnnnnnnnnnnnnnnnnnnnnnnnnnnnnnnnnnnnnnnnnnnnnnnnnnnnnnnnnnnnnnnnnnnnnnnnnnnnnnnnnnnnnnnnnnnnnnnnnnnnnnnnnnnnnnnnnnnnnnnnnnnnnnnnnnnnnnnnnnnnnnnnnnnnnnnnnnnnnnnnnnnnnnnnnnnnnnnnnnnnnnnnnnnnnnnnnnnnnnnnnnnnnnnnnnnnnnnnnnnnnnnnnnnnnnnnnnnnnnnnnnnnnnnnnnnnnnnnnnnnnnnnnnnnnnnnnnnnnnnnnnnnnnnnnnnnnnnnnnnnnnnnnnnnnnnnnnnnnnnnnnnnnnnnnnnnnnnnnnnnnnnnnnnnnnnnnnnnnnnnnnnnnnnnnnnnnnnnnnnnnnnnnnnnnnnnnnnnnnnnnnnnnnnnnnnnnnnnnnnnnnnnnnnnnnnnnnnnnnnnnnnnnnnnnnnnnnnnnnnnnnnnnnnnnnnnnnnnnnnnnnnnnnnnnnnnnnnnnnnnnnnnnnnnnnnnnnnnnnnnnnnnnnnnnnnnnnnnnnnnnnnnnnnnnnnnnnnnnnnnnnnnnnnnnnnnnnnnnnnnnnnnnnnnnnnnnnnnnnnnnnnnnnnnnnnnnnnnnnnnnnnnnnnnnnnnnnnnnnnnnnnnnnnnnnnnnnnnnnnnnnnnnnnnnnnnnnnnnnnnnnnnnnnnnnnnnnnnnnnnnnnnnnnnnnnnnnnnnnnnnnnnnnnnnnnnnnnnnnnnnnnnnnnnnnnnnnnnnnnnnnnnnnnnnnnnnnnnnnnnnnnnnnnnnnnnnnnnnnnnnnnnnnnnnnnnnnnnnnnnnnnnnnnnnnnnnnnnnnnnnnnnnnnnnnnnnnnnnnnnnnnnnnnnnnnnnnnnnnnnnnnnnnnnnnnnnnnnnnnnnnnnnnnnnnnnnnnnnnnnnnnnnnnnnnnnnnnnnnnnnnnnnnnnnnnnnnnnnnnnnnnnnnnnnnnnnnnnnnnnnnnnnnnnnnnnnnnnnnnnnnnnnnnnnnnnnnnnnnnnnnnnnnnnnnnnnnnnnnnnnnnnnnnnnnnnnnnnnnnnnnnnnnnnnnnnnnnnnnnnnnnnnnnnnnnnnnnnnnnnnnnnnnnnnnnnnnnnnnnnnnnnnnnnnnnnnnnnnnnnnnnnnnnnnnnnnnnnnnnnnnnnnnnnnnnnnnnnnnnnnnnnnnnnnnnnnnnnnnnnnnnnnnnnnnnnnnnnnnnnnnnnnnnnnnnnnnnnnnnnnnnnnnnnnnnnnnnnnnnnnnnnnnnnnnnnnnnnnnnnnnnnnnnnnnnnnnnnnnnnnnnnnnnnnnnnnnnnnnnnnnnnnnnnnnnnnnnnnnnnnnnnnnnnnnnnnnnnnnnnnnnnnnnnnnnnnnnnnnnnnnnnnnnnnnnnnnnnnnnnnnnnnnnnnnnnnnnnnnnnnnnnnnnnnnnnnnnnnnnnnnnnnnnnnnnnnnnnnnnnnnnnnnnnnnnnnnnnnnnnnnnnnnnnnnnnnnnnnnnnnnnnnnnnnnnnnnnnnnnnnnnnnnnnnnnnnnnnnnnnnnnnnnnnnnnnnnnnnnnnnnnnnnnnnnnnnnnnnnnnnnnnnnnnnnnnnnnnnnnnnnnnnnnnnnnnnnnnnnnnnnnnnnnnnnnnnnnnnnnnnnnnnnnnnnnnnnnnnnnnnnnnnnnnnnnnnnnnnnnnnnnnnnnnnnnnnnnnnnnnnnnnnnnnnnnnnnnnnnnnnnnnnnnnnnnnnnnnnnnnnnnnnnnnnnnnnnnnnnnnnnnnnnnnnnnnnnnnnnnnnnnnnnnnnnnnnnnnnnnnnnnnnnnnnnnnnnnnnnnnnnnnnnnnnnnnnnnnnnnnnnnnnnnnnnnnnnnnnnnnnnnnnnnnnnnnnnnnnnnnnnnnnnnnnnnnnnnnnnnnnnnnnnnnnnnnnnnnnnnnnnnnnnnnnnnnnnnnnnnnnnnnnnnnnnnnnnnnnnnnnnnnnnnnnnnnnnnnnnnnnnnnnnnnnnnnnnnnnnnnnnnnnnnnnnnnnnnnnnnnnnnnnnnnnnnnnnnnnnnnnnnnnnnnnnnnnnnnnnnnnnnnnnnnnnnnnnnnnnnnnnnnnnnnnnnnnnnnnnnnnnnnnnnnnnnnnnnnnnnnnnnnnnnnnnnnnnnnnnnnnnnnnnnnnnnnnnnnnnnnnnnnnnnnnnnnnnnnnnnnnnnnnnnnnnnnnnnnnnnnnnnnnnnnnnnnnnnnnnnnnnnnnnnnnnnnnnnnnnnnnnnnnnnnnnnnnnnnnnnnnnnnnnnnnnnnnnnnnnnnnnnnnnnnnnnnnnnnnnnnnnnnnnnnnnnnnnnnnnnnnnnnnnnnnnnnnnnnnnnnnnnnnnnnnnnnnnnnnnnnnnnnnnnnnnnnnnnnnnnnnnnnnnnnnnnnnnnnnnnnnnnnnnnnnnnnnnnnnnnnnnnnnnnnnnnnnnnnnnnnnnnnnnnnnnnnnnnnnnnnnnnnnnnnnnnnnnnnnnnnnnnnnnnnnnnnnnnnnnnnnnnnnnnnnnnnnnnnnnnnnnnnnnnnnnnnnnnnnnnnnnnnnnnnnnnnnnnnnnnnnnnnnnnnnnnnnnnnnnnnnnnnnnnnnnnnnnnnnnnnnnnnnnnnnnnnnnnnnnnnnnnnnnnnnnnnnnnnnnnnnnnnnnnnnnnnnnnnnnnnnnnnnnnnnnnnnnnnnnnnnnnnnnnnnnnnnnnnnnnnnnnnnnnnnnnnnnnnnnnnnnnnnnnnnnnnnnnnnnnnnnnnnnnnnnnnnnnnnnnnnnnnnnnnnnnnnnnnnnnnnnnnnnnnnnnnnnnnnnnnnnnnnnnnnnnnnnnnnnnnnnnnnnnnnnnnnnnnnnnnnnnnnnnnnnnnnnnnnnnnnnnnnnnnnnnnnnnnnnnnnnnnnnnnnnnnnnnnnnnnnnnnnnnnnnnnnnnnnnnnnnnnnnnnnnnnnnnnnnnnnnnnnnnnnnnnnnnnnnnnnnnnnnnnnnnnnnnnnnnnnnnnnnnnnnnnnnnnnnnnnnnnnnnnnnnnnnnnnnnnnnnnnnnnnnnnnnnnnnnnnnnnnnnnnnnnnnnnnnnnnnnnnnnnnnnnnnnnnnnnnnnnnnnnnnnnnnnnnnnnnnnnnnnnnnnnnnnnnnnnnnnnnnnnnnnnnnnnnnnnnnnnnnnnnnnnnnnnnnnnnnnnnnnnnnnnnnnnnnnnnnnnnnnnnnnnnnnnnnnnnnnnnnnnnnnnnnnnnnnnnnnnnnnnnnnnnnnnnnnnnnnnnnnnnnnnnnnnnnnnnnnnnnnnnnnnnnnnnnnnnnnnnnnnnnnnnnnnnnnnnnnnnnnnnnnnnnnnnnnnnnnnnnnnnnnnnnnnnnnnnnnnnnnnnnnnnnnnnnnnnnnnnnnnnnnnnnnnnnnnnnnnnnnnnnnnnnnnnnnnnnnnnnnnnnnnnnnnnnnnnnnnnnnnnnnnnnnnnnnnnnnnnnnnnnnnnnnnnnnnnnnnnnnnnnnnnnnnnnnnnnnnnnnnnnnnnnnnnnnnnnnnnnnnnnnnnnnnnnnnnnnnnnnnnnnnnnnnnnnnnnnnnnnnnnnnnnnnnnnnnnnnnnnnnnnnnnnnnnnnnnnnnnnnnnnnnnnnnnnnnnnnnnnnnnnnnnnnnnnnnnnnnnnnnnnnnnnnnnnnnnnnnnnnnnnnnnnnnnnnnnnnnnnnnnnnnnnnnnnnnnnnnnnnnnnnnnnnnnnnnnnnnnnnnnnnnnnnnnnnnnnnnnnnnnnnnnnnnnnnnnnnnnnnnnnnnnnnnnnnnnnnnnnnnnnnnnnnnnnnnnnnnnnnnnnnnnnnnnnnnnnnnnnnnnnnnnnnnnnnnnnnnnnnnnnnnnnnnnnnnnnnnnnnnnnnnnnnnnnnnnnnnnnnnnnnnnnnnnnnnnnnnnnnnnnnnnnnnnnnnnnnnnnnnnnnnnnnnnnnnnnnnnnnnnnnnnnnnnnnnnnnnnnnnnnnnnnnnnnnnnnnnnnnnnnnnnnnnnnnnnnnnnnnnnnnnnnnnnnnnnnnnnnnnnnnnnnnnnnnnnnnnnnnnnnnnnnnnnnnnnnnnnnnnnnnnnnnnnnnnnnnnnnnnnnnnnnnnnnnnnnnnnnnnnnnnnnnnnnnnnnnnnnnnnnnnnnnnnnnnnnnnnnnnnnnnnnnnnnnnnnnnnnnnnnnnnnnnnnnnnnnnnnnnnnnnnnnnnnnnnnnnnnnnnnnnnnnnnnnnnnnnnnnnnnnnnnnnnnnnnnnnnnnnnnnnnnnnnnnnnnnnnnnnnnnnnnnnnnnnnnnnnnnnnnnnnnnnnnnnnnnnnnnnnnnnnnnnnnnnnnnnnnnnnnnnnnnnnnnnnnnnnnnnnnnnnnnnnnnnnnnnnnnnnnnnnnnnnnnnnnnnnnnnnnnnnnnnnnnnnnnnnnnnnnnnnnnnnnnnnnnnnnnnnnnnnnnnnnnnnnnnnnnnnnnnnnnnnnnnnnnnnnnnnnnnnnnnnnnnnnnnnnnnnnnnnnnnnnnnnnnnnnnnnnnnnnnnnnnnnnnnnnnnnnnnnnnnnnnnnnnnnnnnnnnnnnnnnnnnnnnnnnnnnnnnnnnnnnnnnnnnnnnnnnnnnnnnnnnnnnnnnnnnnnnnnnnnnnnnnnnnnnnnnnnnnnnnnnnnnnnnnnnnnnnnnnnnnnnnnnnnnnnnnnnnnnnnnnnnnnnnnnnnnnnnnnnnnnnnnnnnnnnnnnnnnnnnnnnnnnnnnnnnnnnnnnnnnnnnnnnnnnnnnnnnnnnnnnnnnnnnnnnnnnnnnnnnnnnnnnnnnnnnnnnnnnnnnnnnnnnnnnnnnnnnnnnnnnnnnnnnnnnnnnnnnnnnnnnnnnnnnnnnnnnnnnnnnnnnnnnnnnnnnnnnnnnnnnnnnnnnnnnnnnnnnnnnnnnnnnnnnnnnnnnnnnnnnnnnnnnnnnnnnnnnnnnnnnnnnnnnnnnnnnnnnnnnnnnnnnnnnnnnnnnnnnnnnnnnnnnnnnnnnnnnnnnnnnnnnnnnnnnnnnnnnnnnnnnnnnnnnnnnnnnnnnnnnnnnnnnnnnnnnnnnnnnnnnnnnnnnnnnnnnnnnnnnnnnnnnnnnnnnnnnnnnnnnnnnnnnnnnnnnnnnnnnnnnnnnnnnnnnnnnnnnnnnnnnnnnnnnnnnnnnnnnnnnnnnnnnnnnnnnnnnnnnnnnnnnnnnnnnnnnnnnnnnnnnnnnnnnnnnnnnnnnnnnnnnnnnnnnnnnnnnnnnnnnnnnnnnnnnnnnnnnnnnnnnnnnnnnnnnnnnnnnnnnnnnnnnnnnnnnnnnnnnnnnnnnnnnnnnnnnnnnnnnnnnnnnnnnnnnnnnnnnnnnnnnnnnnnnnnnnnnnnnnnnnnnnnnnnnnnnnnnnnnnnnnnnnnnnnnnnnnnnnnnnnnnnnnnnnnnnnnnnnnnnnnnnnnnnnnnnnnnnnnnnnnnnnnnnnnnnnnnnnnnnnnnnnnnnnnnnnnnnnnnnnnnnnnnnnnnnnnnnnnnnnnnnnnnnnnnnnnnnnnnnnnnnnnnnnnnnnnnnnnnnnnnnnnnnnnnnnnnnnnnnnnnnnnnnnnnnnnnnnnnnnnnnnnnnnnnnnnnnnnnnnnnnnnnnnnnnnnnnnnnnnnnnnnnnnnnnnnnnnnnnnnnnnnnnnnnnnnnnnnnnnnnnnnnnnnnnnnnnnnnnnnnnnnnnnnnnnnnnnnnnnnnnnnnnnnnnnnnnnnnnnnnnnnnnnnnnnnnnnnnnnnnnnnnnnnnnnnnnnnnnnnnnnnnnnnnnnnnnnnnnnnnnnnnnnnnnnnnnnnnnnnnnnnnnnnnnnnnnnnnnnnnnnnnnnnnnnnnnnnnnnnnnnnnnnnnnnnnnnnnnnnnnnnnnnnnnnnnnnnnnnnnnnnnnnnnnnnnnnnnnnnnnnnnnnnnnnnnnnnnnnnnnnnnnnnnnnnnnnnnnnnnnnnnnnnnnnnnnnnnnnnnnnnnnnnnnnnnnnnnnnnnnnnnnnnnnnnnnnnnnnnnnnnnnnnnnnnnnnnnnnnnnnnnnnnnnnnnnnnnnnnnnnnnnnnnnnnnnnnnnnnnnnnnnnnnnnnnnnnnnnnnnnnnnnnnnnnnnnnnnnnnnnnnnnnnnnnnnnnnnnnnnnnnnnnnnnnnnnnnnnnnnnnnnnnnnnnnnnnnnnnnnnnnnnnnnnnnnnnnnnnnnnnnnnnnnnnnnnnnnnnnnnnnnnnnnnnnnnnnnnnnnnnnnnnnnnnnnnnnnnnnnnnnnnnnnnnnnnnnnnnnnnnnnnnnnnnnnnnnnnnnnnnnnnnnnnnnnnnnnnnnnnnnnnnnnnnnnnnnnnnnnnnnnnnnnnnnnnnnnnnnnnnnnnnnnnnnnnnnnnnnnnnnnnnnnnnnnnnnnnnnnnnnnnnnnnnnnnnnnnnnnnnnnnnnnnnnnnnnnnnnnnnnnnnnnnnnnnnnnnnnnnnnnnnnnnnnnnnnnnnnnnnnnnnnnnnnnnnnnnnnnnnnnnnnnnnnnnnnnnnnnnnnnnnnnnnnnnnnnnnnnnnnnnnnnnnnnnnnnnnnnnnnnnnnnnnnnnnnnnnnnnnnnnnnnnnnnnnnnnnnnnnnnnnnnnnnnnnnnnnnnnnnnnnnnnnnnnnnnnnnnnnnnnnnnnnnnnnnnnnnnnnnnnnnnnnnnnnnnnnnnnnnnnnnnnnnnnnnnnnnnnnnnnnnnnnnnnnnnnnnnnnnnnnnnnnnnnnnnnnnnnnnnnnnnnnnnnnnnnnnnnnnnnnnnnnnnnnnnnnnnnnnnnnnnnnnnnnnnnnnnnnnnnnnnnnnnnnnnnnnnnnnnnnnnnnnnnnnnnnnnnnnnnnnnnnnnnnnnnnnnnnnnnnnnnnnnnnnnnnnnnnnnnnnnnnnnnnnnnnnnnnnnnnnnnnnnnnnnnnnnnnnnnnnnnnnnnnnnnnnnnnnnnnnnnnnnnnnnnnnnnnnnnnnnnnnnnnnnnnnnnnnnnnnnnnnnnnnnnnnnnnnnnnnnnnnnnnnnnnnnnnnnnnnnnnnnnnnnnnnnnnnnnnnnnnnnnnnnnnnnnnnnnnnnnnnnnnnnnnnnnnnnnnnnnnnnnnnnnnnnnnnnnnnnnnnnnnnnnnnnnnnnnnnnnnnnnnnnnnnnnnnnnnnnnnnnnnnnnnnnnnnnnnnnnnnnnnnnnnnnnnnnnnnnnnnnnnnnnnnnnnnnnnnnnnnnnnnnnnnnnnnnnnnnnnnnnnnnnnnnnnnnnnnnnnnnnnnnnnnnnnnnnnnnnnnnnnnnnnnnnnnnnnnnnnnnnnnnnnnnnnnnnnnnnnnnnnnnnnnnnnnnnnnnnnnnnnnnnnnnnnnnnnnnnnnnnnnnnnnnnnnnnnnnnnnnnnnnnnnnnnnnnnnnnnnnnnnnnnnnnnnnnnnnnnnnnnnnnnnnnnnnnnnnnnnnnnnnnnnnnnnnnnnnnnnnnnnnnnnnnnnnnnnnnnnnnnnnnnnnnnnnnnnnnnnnnnnnnnnnnnnnnnnnnnnnnnnnnnnnnnnnnnnnnnnnnnnnnnnnnnnnnnnnnnnnnnnnnnnnnnnnnnnnnnnnnnnnnnnnnnnnnnnnnnnnnnnnnnnnnnnnnnnnnnnnnnnnnnnnnnnnnnnnnnnnnnnnnnnnnnnnnnnnnnnnnnnnnnnnnnnnnnnnnnnnnnnnnnnnnnnnnnnnnnnnnnnnnnnnnnnnnnnnnnnnnnnnnnnnnnnnnnnnnnnnnnnnnnnnnnnnnnnnnnnnnnnnnnnnnnnnnnnnnnnnnnnnnnnnnnnnnnnnnnnnnnnnnnnnnnnnnnnnnnnnnnnnnnnnnnnnnnnnnnnnnnnnnnnnnnnnnnnnnnnnnnnnnnnnnnnnnnnnnnnnnnnnnnnnnnnnnnnnnnnnnnnnnnnnnnnnnnnnnnnnnnnnnnnnnnnnnnnnnnnnnnnnnnnnnnnnnnnnnnnnnnnnnnnnnnnnnnnnnnnnnnnnnnnnnnnnnnnnnnnnnnnnnnnnnnnnnnnnnnnnnnnnnnnnnnnnnnnnnnnnnnnnnnnnnnnnnnnnnnnnnnnnnnnnnnnnnnnnnnnnnnnnnnnnnnnnnnnnnnnnnnnnnnnnnnnnnnnnnnnnnnnnnnnnnnnnnnnnnnnnnnnnnnnnnnnnnnnnnnnnnnnnnnnnnnnnnnnnnnnnnnnnnnnnnnnnnnnnnnnnnnnnnnnnnnnnnnnnnnnnnnnnnnnnnnnnnnnnnnnnnnnnnnnnnnnnnnnnnnnnnnnnnnnnnnnnnnnnnnnnnnnnnnnnnnnnnnnnnnnnnnnnnnnnnnnnnnnnnnnnnnnnnnnnnnnnnnnnnnnnnnnnnnnnnnnnnnnnnnnnnnnnnnnnnnnnnnnnnnnnnnnnnnnnnnnnnnnnnnnnnnnnnnnnnnnnnnnnnnnnnnnnnnnnnnnnnnnnnnnnnnnnnnnnnnnnnnnnnnnnnnnnnnnnnnnnnnnnnnnnnnnnnnnnnnnnnnnnnnnnnnnnnnnnnnnnnnnnnnnnnnnnnnnnnnnnnnnnnnnnnnnnnnnnnnnnnnnnnnnnnnnnnnnnnnnnnnnnnnnnnnnnnnnnnnnnnnnnnnnnnnnnnnnnnnnnnnnnnnnnnnnnnnnnnnnnnnnnnnnnnnnnnnnnnnnnnnnnnnnnnnnnnnnnnnnnnnnnnnnnnnnnnnnnnnnnnnnnnnnnnnnnnnnnnnnnnnnnnnnnnnnnnnnnnnnnnnnnnnnnnnnnnnnnnnnnnnnnnnnnnnnnnnnnnnnnnnnnnnnnnnnnnnnnnnnnnnnnnnnnnnnnnnnnnnnnnnnnnnnnnnnnnnnnnnnnnnnnnnnnnnnnnnnnnnnnnnnnnnnnnnnnnnnnnnnnnnnnnnnnnnnnnnnnnnnnnnnnnnnnnnnnnnnnnnnnnnnnnnnnnnnnnnnnnnnnnnnnnnnnnnnnnnnnnnnnnnnnnnnnnnnnnnnnnnnnnnnnnnnnnnnnnnnnnnnnnnnnnnnnnnnnnnnnnnnnnnnnnnnnnnnnnnnnnnnnnnnnnnnnnnnnnnnnnnnnnnnnnnnnnnnnnnnnnnnnnnnnnnnnnnnnnnnnnnnnnnnnnnnnnnnnnnnnnnnnnnnnnnnnnnnnnnnnnnnnnnnnnnnnnnnnnnnnnnnnnnnnnnnnnnnnnnnnnnnnnnnnnnnnnnnnnnnnnnnnnnnnnnnnnnnnnnnnnnnnnnnnnnnnnnnnnnnnnnnnnnnnnnnnnnnnnnnnnnnnnnnnnnnnnnnnnnnnnnnnnnnnnnnnnnnnnnnnnnnnnnnnnnnnnnnnnnnnnnnnnnnnnnnnnnnnnnnnnnnnnnnnnnnnnnnnnnnnnnnnnnnnnnnnnnnnnnnnnnnnnnnnnnnnnnnnnnnnnnnnnnnnnnnnnnnnnnnnnnnnnnnnnnnnnnnnnnnnnnnnnnnnnnnnnnnnnnnnnnnnnnnnnnnnnnnnnnnnnnnnnnnnnnnnnnnnnnnnnnnnnnnnnnnnnnnnnnnnnnnnnnnnnnnnnnnnnnnnnnnnnnnnnnnnnnnnnnnnnnnnnnnnnnnnnnnnnnnnnnnnnnnnnnnnnnnnnnnnnnnnnnnnnnnnnnnnnnnnnnnnnnnnnnnnnnnnnnnnnnnnnnnnnnnnnnnnnnnnnnnnnnnnnnnnnnnnnnnnnnnnnnnnnnnnnnnnnnnnnnnnnnnnnnnnnnnnnnnnnnnnnnnnnnnnnnnnnnnnnnnnnnnnnnnnnnnnnnnnnnnnnnnnnnnnnnnnnnnnnnnnnnnnnnnnnnnnnnnnnnnnnnnnnnnnnnnnnnnnnnnnnnnnnnnnnnnnnnnnnnnnnnnnnnnnnnnnnnnnnnnnnnnnnnnnnnnnnnnnnnnnnnnnnnnnnnnnnnnnnnnnnnnnnnnnnnnnnnnnnnnnnnnnnnnnnnnnnnnnnnnnnnnnnnnnnnnnnnnnnnnnnnnnnnnnnnnnnnnnnnnnnnnnnnnnnnnnnnnnnnnnnnnnnnnnnnnnnnnnnnnnnnnnnnnnnnnnnnnnnnnnnnnnnnnnnnnnnnnnnnnnnnnnnnnnnnnnnnnnnnnnnnnnnnnnnnnnnnnnnnnnnnnnnnnnnnnnnnnnnnnnnnnnnnnnnnnnnnnnnnnnnnnnnnnnnnnnnnnnnnnnnnnnnnnnnnnnnnnnnnnnnnnnnnnnnnnnnnnnnnnnnnnnnnnnnnnnnnnnnnnnnnnnnnnnnnnnnnnnnnnnnnnnnnnnnnnnnnnnnnnnnnnnnnnnnnnnnnnnnnnnnnnnnnnnnnnnnnnnnnnnnnnnnnnnnnnnnnnnnnnnnnnnnnnnnnnnnnnnnnnnnnnnnnnnnnnnnnnnnnnnnnnnnnnnnnnnnnnnnnnnnnnnnnnnnnnnnnnnnnnnnnnnnnnnnnnnnnnnnnnnnnnnnnnnnnnnnnnnnnnnnnnnnnnnnnnnnnnnnnnnnnnnnnnnnnnnnnnnnnnnnnnnnnnnnnnnnnnnnnnnnnnnnnnnnnnnnnnnnnnnnnnnnnnnnnnnnnnnnnnnnnnnnnnnnnnnnnnnnnnnnnnnnnnnnnnnnnnnnnnnnnnnnnnnnnnnnnnnnnnnnnnnnnnnnnnnnnnnnnnnnnnnnnnnnnnnnnnnnnnnnnnnnnnnnnnnnnnnnnnnnnnnnnnnnnnnnnnnnnnnnnnnnnnnnnnnnnnnnnnnnnnnnnnnnnnnnnnnnnnnnnnnnnnnnnnnnnnnnnnnnnnnnnnnnnnnnnnnnnnnnnnnnnnnnnnnnnnnnnnnnnnnnnnnnnnnnnnnnnnnnnnnnnnnnnnnnnnnnnnnnnnnnnnnnnnnnnnnnnnnnnnnnnnnnnnnnnnnnnnnnnnnnnnnnnnnnnnnnnnnnnnnnnnnnnnnnnnnnnnnnnnnnnnnnnnnnnnnnnnnnnnnnnnnnnnnnnnnnnnnnnnnnnnnnnnnnnnnnnnnnnnnnnnnnnnnnnnnnnnnnnnnnnnnnnnnnnnnnnnnnnnnnnnnnnnnnnnnnnnnnnnnnnnnnnnnnnnnnnnnnnnnnnnnnnnnnnnnnnnnnnnnnnnnnnnnnnnnnnnnnnnnnnnnnnnnnnnnnnnnnnnnnnnnnnnnnnnnnnnnnnnnnnnnnnnnnnnnnnnnnnnnnnnnnnnnnnnnnnnnnnnnnnnnnnnnnnnnnnnnnnnnnnnnnnnnnnnnnnnnnnnnnnnnnnnnnnnnnnnnnnnnnnnnnnnnnnnnnnnnnnnnnnnnnnnnnnnnnnnnnnnnnnnnnnnnnnnnnnnnnnnnnnnnnnnnnnnnnnnnnnnnnnnnnnnnnnnnnnnnnnnnnnnnnnnnnnnnnnnnnnnnnnnnnnnnnnnnnnnnnnnnnnnnnnnnnnnnnnnnnnnnnnnnnnnnnnnnnnnnnnnnnnnnnnnnnnnnnnnnnnnnnnnnnnnnnnnnnnnnnnnnnnnnnnnnnnnnnnnnnnnnnnnnnnnnnnnnnnnnnnnnnnnnnnnnnnnnnnnnnnnnnnnnnnnnnnnnnnnnnnnnnnnnnnnnnnnnnnnnnnnnnnnnnnnnnnnnnnnnnnnnnnnnnnnnnnnnnnnnnnnnnnnnnnnnnnnnnnnnnnnnnnnnnnnnnnnnnnnnnnnnnnnnnnnnnnnnnnnnnnnnnnnnnnnnnnnnnnnnnnnnnnnnnnnnnnnnnnnnnnnnnnnnnnnnnnnnnnnnnnnnnnnnnnnnnnnnnnnnnnnnnnnnnnnnnnnnnnnnnnnnnnnnnnnnnnnnnnnnnnnnnnnnnnnnnnnnnnnnnnnnnnnnnnnnnnnnnnnnnnnnnnnnnnnnnnnnnnnnnnnnnnnnnnnnnnnnnnnnnnnnnnnnnnnnnnnnnnnnnnnnnnnnnnnnnnnnnnnnnnnnnnnnnnnnnnnnnnnnnnnnnnnnnnnnnnnnnnnnnnnnnnnnnnnnnnnnnnnnnnnnnnnnnnnnnnnnnnnnnnnnnnnnnnnnnnnnnnnnnnnnnnnnnnnnnnnnnnnnnnnnnnnnnnnnnnnnnnnnnnnnnnnnnnnnnnnnnnnnnnnnnnnnnnnnnnnnnnnnnnnnnnnnnnnnnnnnnnnnnnnnnnnnnnnnnnnnnnnnnnnnnnnnnnnnnnnnnnnnnnnnnnnnnnnnnnnnnnnnnnnnnnnnnnnnnnnnnnnnnnnnnnnnnnnnnnnnnnnnnnnnnnnnnnnnnnnnnnnnnnnnnnnnnnnnnnnnnnnnnnnnnnnnnnnnnnnnnnnnnnnnnnnnnnnnnnnnnnnnnnnnnnnnnnnnnnnnnnnnnnnnnnnnnnnnnnnnnnnnnnnnnnnnnnnnnnnnnnnnnnnnnnnnnnnnnnnnnnnnnnnnnnnnnnnnnnnnnnnnnnnnnnnnnnnnnnnnnnnnnnnnnnnnnnnnnnnnnnnnnnnnnnnnnnnnnnnnnnnnnnnnnnnnnnnnnnnnnnnnnnnnnnnnnnnnnnnnnnnnnnnnnnnnnnnnnnnnnnnnnnnnnnnnnnnnnnnnnnnnnnnnnnnnnnnnnnnnnnnnnnnnnnnnnnnnnnnnnnnnnnnnnnnnnnnnnnnnnnnnnnnnnnnnnnnnnnnnnnnnnnnnnnnnnnnnnnnnnnnnnnnnnnnnnnnnnnnnnnnnnnnnnnnnnnnnnnnnnnnnnnnnnnnnnnnnnnnnnnnnnnnnnnnnnnnnnnnnnnnnnnnnnnnnnnnnnnnnnnnnnnnnnnnnnnnnnnnnnnnnnnnnnnnnnnnnnnnnnnnnnnnnnnnnnnnnnnnnnnnnnnnnnnnnnnnnnnnnnnnnnnnnnnnnnnnnnnnnnnnnnnnnnnnnnnnnnnnnnnnnnnnnnnnnnnnnnnnnnnnnnnnnnnnnnnnnnnnnnnnnnnnnnnnnnnnnnnnnnnnnnnnnnnnnnnnnnnnnnnnnnnnnnnnnnnnnnnnnnnnnnnnnnnnnnnnnnnnnnnnnnnnnnnnnnnnnnnnnnnnnnnnnnnnnnnnnnnnnnnnnnnnnnnnnnnnnnnnnnnnnnnnnnnnnnnnnnnnnnnnnnnnnnnnnnnnnnnnnnnnnnnnnnnnnnnnnnnnnnnnnnnnnnnnnnnnnnnnnnnnnnnnnnnnnnnnnnnnnnnnnnnnnnnnnnnnnnnnnnnnnnnnnnnnnnnnnnnnnnnnnnnnnnnnnnnnnnnnnnnnnnnnnnnnnnnnnnnnnnnnnnnnnnnnnnnnnnnnnnnnnnnnnnnnnnnnnnnnnnnnnnnnnnnnnnnnnnnnnnnnnnnnnnnnnnnnnnnnnnnnnnnnnnnnnnnnnnnnnnnnnnnnnnnnnnnnnnnnnnnnnnnnnnnnnnnnnnnnnnnnnnnnnnnnnnnnnnnnnnnnnnnnnnnnnnnnnnnnnnnnnnnnnnnnnnnnnnnnnnnnnnnnnnnnnnnnnnnnnnnnnnnnnnnnnnnnnnnnnnnnnnnnnnnnnnnnnnnnnnnnnnnnnnnnnnnnnnnnnnnnnnnnnnnnnnnnnnnnnnnnnnnnnnnnnnnnnnnnnnnnnnnnnnnnnnnnnnnnnnnnnnnnnnnnnnnnnnnnnnnnnnnnnnnnnnnnnnnnnnnnnnnnnnnnnnnnnnnnnnnnnnnnnnnnnnnnnnnnnnnnnnnnnnnnnnnnnnnnnnnnnnnnnnnnnnnnnnnnnnnnnnnnnnnnnnnnnnnnnnnnnnnnnnnnnnnnnnnnnnnnnnnnnnnnnnnnnnnnnnnnnnnnnnnnnnnnnnnnnnnnnnnnnnnnnnnnnnnnnnnnnnnnnnnnnnnnnnnnnnnnnnnnnnnnnnnnnnnnnnnnnnnnnnnnnnnnnnnnnnnnnnnnnnnnnnnnnnnnnnnnnnnnnnnnnnnnnnnnnnnnnnnnnnnnnnnnnnnnnnnnnnnnnnnnnnnnnnnnnnnnnnnnnnnnnnnnnnnnnnnnnnnnnnnnnnnnnnnnnnnnnnnnnnnnnnnnnnnnnnnnnnnnnnnnnnnnnnnnnnnnnnnnnnnnnnnnnnnnnnnnnnnnnnnnnnnnnnnnnnnnnnnnnnnnnnnnnnnnnnnnnnnnnnnnnnnnnnnnnnnnnnnnnnnnnnnnnnnnnnnnnnnnnnnnnnnnnnnnnnnnnnnnnnnnnnnnnnnnnnnnnnnnnnnnnnnnnnnnnnnnnnnnnnnnnnnnnnnnnnnnnnnnnnnnnnnnnnnnnnnnnnnnnnnnnnnnnnnnnnnnnnnnnnnnnnnnnnnnnnnnnnnnnnnnnnnnnnnnnnnnnnnnnnnnnnnnnnnnnnnnnnnnnnnnnnnnnnnnnnnnnnnnnnnnnnnnnnnnnnnnnnnnnnnnnnnnnnnnnnnnnnnnnnnnnnnnnnnnnnnnnnnnnnnnnnnnnnnnnnnnnnnnnnnnnnnnnnnnnnnnnnnnnnnnnnnnnnnnnnnnnnnnnnnnnnnnnnnnnnnnnnnnnnnnnnnnnnnnnnnnnnnnnnnnnnnnnnnnnnnnnnnnnnnnnnnnnnnnnnnnnnnnnnnnnnnnnnnnnnnnnnnnnnnnnnnnnnnnnnnnnnnnnnnnnnnnnnnnnnnnnnnnnnnnnnnnnnnnnnnnnnnnnnnnnnnnnnnnnnnnnnnnnnnnnnnnnnnnnnnnnnnnnnnnnnnnnnnnnnnnnnnnnnnnnnnnnnnnnnnnnnnnnnnnnnnnnnnnnnnnnnnnnnnnnnnnnnnnnnnnnnnnnnnnnnnnnnnnnnnnnnnnnnnnnnnnnnnnnnnnnnnnnnnnnnnnnnnnnnnnnnnnnnnnnnnnnnnnnnnnnnnnnnnnnnnnnnnnnnnnnnnnnnnnnnnnnnnnnnnnnnnnnnnnnnnnnnnnnnnnnnnnnnnnnnnnnnnnnnnnnnnnnnnnnnnnnnnnnnnnnnnnnnnnnnnnnnnnnnnnnnnnnnnnnnnnnnnnnnnnnnnnnnnnnnnnnnnnnnnnnnnnnnnnnnnnnnnnnnnnnnnnnnnnnnnnnnnnnnnnnnnnnnnnnnnnnnnnnnnnnnnnnnnnnnnnnnnnnnnnnnnnnnnnnnnnnnnnnnnnnnnnnnnnnnnnnnnnnnnnnnnnnnnnnnnnnnnnnnnnnnnnnnnnnnnnnnnnnnnnnnnnnnnnnnnnnnnnnnnnnnnnnnnnnnnnnnnnnnnnnnnnnnnnnnnnnnnnnnnnnnnnnnnnnnnnnnnnnnnnnnnnnnnnnnnnnnnnnnnnnnnnnnnnnnnnnnnnnnnnnnnnnnnnnnnnnnnnnnnnnnnnnnnnnnnnnnnnnnnnnnnnnnnnnnnnnnnnnnnnnnnnnnnnnnnnnnnnnnnnnnnnnnnnnnnnnnnnnnnnnnnnnnnnnnnnnnnnnnnnnnnnnnnnnnnnnnnnnnnnnnnnnnnnnnnnnnnnnnnnnnnnnnnnnnnnnnnnnnnnnnnnnnnnnnnnnnnnnnnnnnnnnnnnnnnnnnnnnnnnnnnnnnnnnnnnnnnnnnnnnnnnnnnnnnnnnnnnnnnnnnnnnnnnnnnnnnnnnnnnnnnnnnnnnnnnnnnnnnnnnnnnnnnnnnnnnnnnnnnnnnnnnnnnnnnnnnnnnnnnnnnnnnnnnnnnnnnnnnnnnnnnnnnnnnnnnnnnnnnnnnnnnnnnnnnnnnnnnnnnnnnnnnnnnnnnnnnnnnnnnnnnnnnnnnnnnnnnnnnnnnnnnnnnnnnnnnnnnnnnnnnnnnnnnnnnnnnnnnnnnnnnnnnnnnnnnnnnnnnnnnnnnnnnnnnnnnnnnnnnnnnnnnnnnnnnnnnnnnnnnnnnnnnnnnnnnnnnnnnnnnnnnnnnnnnnnnnnnnnnnnnnnnnnnnnnnnnnnnnnnnnnnnnnnnnnnnnnnnnnnnnnnnnnnnnnnnnnnnnnnnnnnnnnnnnnnnnnnnnnnnnnnnnnnnnnnnnnnnnnnnnnnnnnnnnnnnnnnnnnnnnnnnnnnnnnnnnnnnnnnnnnnnnnnnnnnnnnnnnnnnnnnnnnnnnnnnnnnnnnnnnnnnnnnnnnnnnnnnnnnnnnnnnnnnnnnnnnnnnnnnnnnnnnnnnnnnnnnnnnnnnnnnnnnnnnnnnnnnnnnnnnnnnnnnnnnnnnnnnnnnnnnnnnnnnnnnnnnnnnnnnnnnnnnnnnnnnnnnnnnnnnnnnnnnnnnnnnnnnnnnnnnnnnnnnnnnnnnnnnnnnnnnnnnnnnnnnnnnnnnnnnnnnnnnnnnnnnnnnnnnnnnnnnnnnnnnnnnnnnnnnnnnnnnnnnnnnnnnnnnnnnnnnnnnnnnnnnnnnnnnnnnnnnnnnnnnnnnnnnnnnnnnnnnnnnnnnnnnnnnnnnnnnnnnnnnnnnnnnnnnnnnnnnnnnnnnnnnnnnnnnnnnnnnnnnnnnnnnnnnnnnnnnnnnnnnnnnnnnnnnnnnnnnnnnnnnnnnnnnnnnnnnnnnnnnnnnnnnnnnnnnnnnnnnnnnnnnnnnnnnnnnnnnnnnnnnnnnnnnnnnnnnnnnnnnnnnnnnnnnnnnnnnnnnnnnnnnnnnnnnnnnnnnnnnnnnnnnnnnnnnnnnnnnnnnnnnnnnnnnnnnnnnnnnnnnnnnnnnnnnnnnnnnnnnnnnnnnnnnnnnnnnnnnnnnnnnnnnnnnnnnnnnnnnnnnnnnnnnnnnnnnnnnnnnnnnnnnnnnnnnnnnnnnnnnnnnnnnnnnnnnnnnnnnnnnnnnnnnnnnnnnnnnnnnnnnnnnnnnnnnnnnnnnnnnnnnnnnnnnnnnnnnnnnnnnnnnnnnnnnnnnnnnnnnnnnnnnnnnnnnnnnnnnnnnnnnnnnnnnnnnnnnnnnnnnnnnnnnnnnnnnnnnnnnnnnnnnnnnnnnnnnnnnnnnnnnnnnnnnnnnnnnnnnnnnnnnnnnnnnnnnnnnnnnnnnnnnnnnnnnnnnnnnnnnnnnnnnnnnnnnnnnnnnnnnnnnnnnnnnnnnnnnnnnnnnnnnnnnnnnnnnnnnnnnnnnnnnnnnnnnnnnnnnnnnnnnnnnnnnnnnnnnnnnnnnnnnnnnnnnnnnnnnnnnnnnnnnnnnnnnnnnnnnnnnnnnnnnnnnnnnnnnnnnnnnnnnnnnnnnnnnnnnnnnnnnnnnnnnnnnnnnnnnnnnnnnnnnnnnnnnnnnnnnnnnnnnnnnnnnnnnnnnnnnnnnnnnnnnnnnnnnnnnnnnnnnnnnnnnnnnnnnnnnnnnnnnnnnnnnnnnnnnnnnnnnnnnnnnnnnnnnnnnnnnnnnnnnnnnnnnnnnnnnnnnnnnnnnnnnnnnnnnnnnnnnnnnnnnnnnnnnnnnnnnnnnnnnnnnnnnnnnnnnnnnnnnnnnnnnnnnnnnnnnnnnnnnnnnnnnnnnnnnnnnnnnnnnnnnnnnnnnnnnnnnnnnnnnnnnnnnnnnnnnnnnnnnnnnnnnnnnnnnnnnnnnnnnnnnnnnnnnnnnnnnnnnnnnnnnnnnnnnnnnnnnnnnnnnnnnnnnnnnnnnnnnnnnnnnnnnnnnnnnnnnnnnnnnnnnnnnnnnnnnnnnnnnnnnnnnnnnnnnnnnnnnnnnnnnnnnnnnnnnnnnnnnnnnnnnnnnnnnnnnnnnnnnnnnnnnnnnnnnnnnnnnnnnnnnnnnnnnnnnnnnnnnnnnnnnnnnnnnnnnnnnnnnnnnnnnnnnnnnnnnnnnnnnnnnnnnnnnnnnnnnnnnnnnnnnnnnnnnnnnnnnnnnnnnnnnnnnnnnnnnnnnnnnnnnnnnnnnnnnnnnnnnnnnnnnnnnnnnnnnnnnnnnnnnnnnnnnnnnnnnnnnnnnnnnnnnnnnnnnnnnnnnnnnnnnnnnnnnnnnnnnnnnnnnnnnnnnnnnnnnnnnnnnnnnnnnnnnnnnnnnnnnnnnnnnnnnnnnnnnnnnnnnnnnnnnnnnnnnnnnnnnnnnnnnnnnnnnnnnnnnnnnnnnnnnnnnnnnnnnnnnnnnnnnnnnnnnnnnnnnnnnnnnnnnnnnnnnnnnnnnnnnnnnnnnnnnnnnnnnnnnnnnnnnnnnnnnnnnnnnnnnnnnnnnnnnnnnnnnnnnnnnnnnnnnnnnnnnnnnnnnnnnnnnnnnnnnnnnnnnnnnnnnnnnnnnnnnnnnnnnnnnnnnnnnnnnnnnnnnnnnnnnnnnnnnnnnnnnnnnnnnnnnnnnnnnnnnnnnnnnnnnnnnnnnnnnnnnnnnnnnnnnnnnnnnnnnnnnnnnnnnnnnnnnnnnnnnnnnnnnnnnnnnnnnnnnnnnnnnnnnnnnnnnnnnnnnnnnnnnnnnnnnnnnnnnnnnnnnnnnnnnnnnnnnnnnnnnnnnnnnnnnnnnnnnnnnnnnnnnnnnnnnnnnnnnnnnnnnnnnnnnnnnnnnnnnnnnnnnnnnnnnnnnnnnnnnnnnnnnnnnnnnnnnnnnnnnnnnnnnnnnnnnnnnnnnnnnnnnnnnnnnnnnnnnnnnnnnnnnnnnnnnnnnnnnnnnnnnnnnnnnnnnnnnnnnnnnnnnnnnnnnnnnnnnnnnnnnnnnnnnnnnnnnnnnnnnnnnnnnnnnnnnnnnnnnnnnnnnnnnnnnnnnnnnnnnnnnnnnnnnnnnnnnnnnnnnnnnnnnnnnnnnnnnnnnnnnnnnnnnnnnnnnnnnnnnnnnnnnnnnnnnnnnnnnnnnnnnnnnnnnnnnnnnnnnnnnnnnnnnnnnnnnnnnnnnnnnnnnnnnnnnnnnnnnnnnnnnnnnnnnnnnnnnnnnnnnnnnnnnnnnnnnnnnnnnnnnnnnnnnnnnnnnnnnnnnnnnnnnnnnnnnnnnnnnnnnnnnnnnnnnnnnnnnnnnnnnnnnnnnnnnnnnnnnnnnnnnnnnnnnnnnnnnnnnnnnnnnnnnnnnnnnnnnnnnnnnnnnnnnnnnnnnnnnnnnnnnnnnnnnnnnnnnnnnnnnnnnnnnnnnnnnnnnnnnnnnnnnnnnnnnnnnnnnnnnnnnnnnnnnnnnnnnnnnnnnnnnnnnnnnnnnnnnnnnnnnnnnnnnnnnnnnnnnnnnnnnnnnnnnnnnnnnnnnnnnnnnnnnnnnnnnnnnnnnnnnnnnnnnnnnnnnnnnnnnnnnnnnnnnnnnnnnnnnnnnnnnnnnnnnnnnnnnnnnnnnnnnnnnnnnnnnnnnnnnnnnnnnnnnnnnnnnnnnnnnnnnnnnnnnnnnnnnnnnnnnnnnnnnnnnnnnnnnnnnnnnnnnnnnnnnnnnnnnnnnnnnnnnnnnnnnnnnnnnnnnnnnnnnnnnnnnnnnnnnnnnnnnnnnnnnnnnnnnnnnnnnnnnnnnnnnnnnnnnnnnnnnnnnnnnnnnnnnnnnnnnnnnnnnnnnnnnnnnnnnnnnnnnnnnnnnnnnnnnnnnnnnnnnnnnnnnnnnnnnnnnnnnnnnnnnnnnnnnnnnnnnnnnnnnnnnnnnnnnnnnnnnnnnnnnnnnnnnnnnnnnnnnnnnnnnnnnnnnnnnnnnnnnnnnnnnnnnnnnnnnnnnnnnnnnnnnnnnnnnnnnnnnnnnnnnnnnnnnnnnnnnnnnnnnnnnnnnnnnnnnnnnnnnnnnnnnnnnnnnnnnnnnnnnnnnnnnnnnnnnnnnnnnnnnnnnnnnnnnnnnnnnnnnnnnnnnnnnnnnnnnnnnnnnnnnnnnnnnnnnnnnnnnnnnnnnnnnnnnnnnnnnnnnnnnnnnnnnnnnnnnnnnnnnnnnnnnnnnnnnnnnnnnnnnnnnnnnnnnnnnnnnnnnnnnnnnnnnnnnnnnnnnnnnnnnnnnnnnnnnnnnnnnnnnnnnnnnnnnnnnnnnnnnnnnnnnnnnnnnnnnnnnnnnnnnnnnnnnnnnnnnnnnnnnnnnnnnnnnnnnnnnnnnnnnnnnnnnnnnnnnnnnnnnnnnnnnnnnnnnnnnnnnnnnnnnnnnnnnnnnnnnnnnnnnnnnnnnnnnnnnnnnnnnnnnnnnnnnnnnnnnnnnnnnnnnnnnnnnnnnnnnnnnnnnnnnnnnnnnnnnnnnnnnnnnnnnnnnnnnnnnnnnnnnnnnnnnnnnnnnnnnnnnnnnnnnnnnnnnnnnnnnnnnnnnnnnnnnnnnnnnnnnnnnnnnnnnnnnnnnnnnnnnnnnnnnnnnnnnnnnnnnnnnnnnnnnnnnnnnnnnnnnnnnnnnnnnnnnnnnnnnnnnnnnnnnnnnnnnnnnnnnnnnnnnnnnnnnnnnnnnnnnnnnnnnnnnnnnnnnnnnnnnnnnnnnnnnnnnnnnnnnnnnnnnnnnnnnnnnnnnnnnnnnnnnnnnnnnnnnnnnnnnnnnnnnnnnnnnnnnnnnnnnnnnnnnnnnnnnnnnnnnnnnnnnnnnnnnnnnnnnnnnnnnnnnnnnnnnnnnnnnnnnnnnnnnnnnnnnnnnnnnnnnnnnnnnnnnnnnnnnnnnnnnnnnnnnnnnnnnnnnnnnnnnnnnnnnnnnnnnnnnnnnnnnnnnnnnnnnnnnnnnnnnnnnnnnnnnnnnnnnnnnnnnnnnnnnnnnnnnnnnnnnnnnnnnnnnnnnnnnnnnnnnnnnnnnnnnnnnnnnnnnnnnnnnnnnnnnnnnnnnnnnnnnnnnnnnnnnnnnnnnnnnnnnnnnnnnnnnnnnnnnnnnnnnnnnnnnnnnnnnnnnnnnnnnnnnnnnnnnnnnnnnnnnnnnnnnnnnnnnnnnnnnnnnnnnnnnnnnnnnnnnnnnnnnnnnnnnnnnnnnnnnnnnnnnnnnnnnnnnnnnnnnnnnnnnnnnnnnnnnnnnnnnnnnnnnnnnnnnnnnnnnnnnnnnnnnnnnnnnnnnnnnnnnnnnnnnnnnnnnnnnnnnnnnnnnnnnnnnnnnnnnnnnnnnnnnnnnnnnnnnnnnnnnnnnnnnnnnnnnnnnnnnnnnnnnnnnnnnnnnnnnnnnnnnnnnnnnnnnnnnnnnnnnnnnnnnnnnnnnnnnnnnnnnnnnnnnnnnnnnnnnnnnnnnnnnnnnnnnnnnnnnnnnnnnnnnnnnnnnnnnnnnnnnnnnnnnnnnnnnnnnnnnnnnnnnnnnnnnnnnnnnnnnnnnnnnnnnnnnnnnnnnnnnnnnnnnnnnnnnnnnnnnnnnnnnnnnnnnnnnnnnnnnnnnnnnnnnnnnnnnnnnnnnnnnnnnnnnnnnnnnnnnnnnnnnnnnnnnnnnnnnnnnnnnnnnnnnnnnnnnnnnnnnnnnnnnnnnnnnnnnnnnnnnnnnnnnnnnnnnnnnnnnnnnnnnnnnnnnnnnnnnnnnnnnnnnnnnnnnnnnnnnnnnnnnnnnnnnnnnnnnnnnnnnnnnnnnnnnnnnnnnnnnnnnnnnnnnnnnnnnnnnnnnnnnnnnnnnnnnnnnnnnnnnnnnnnnnnnnnnnnnnnnnnnnnnnnnnnnnnnnnnnnnnnnnnnnnnnnnnnnnnnnnnnnnnnnnnnnnnnnnnnnnnnnnnnnnnnnnnnnnnnnnnnnnnnnnnnnnnnnnnnnnnnnnnnnnnnnnnnnnnnnnnnnnnnnnnnnnnnnnnnnnnnnnnnnnnnnnnnnnnnnnnnnnnnnnnnnnnnnnnnnnnnnnnnnnnnnnnnnnnnnnnnnnnnnnnnnnnnnnnnnnnnnnnnnnnnnnnnnnnnnnnnnnnnnnnnnnnnnnnnnnnnnnnnnnnnnnnnnnnnnnnnnnnnnnnnnnnnnnnnnnnnnnnnnnnnnnnnnnnnnnnnnnnnnnnnnnnnnnnnnnnnnnnnnnnnnnnnnnnnnnnnnnnnnnnnnnnnnnnnnnnnnnnnnnnnnnnnnnnnnnnnnnnnnnnnnnnnnnnnnnnnnnnnnnnnnnnnnnnnnnnnnnnnnnnnnnnnnnnnnnnnnnnnnnnnnnnnnnnnnnnnnnnnnnnnnnnnnnnnnnnnnnnnnnnnnnnnnnnnnnnnnnnnnnnnnnnnnnnnnnnnnnnnnnnnnnnnnnnnnnnnnnnnnnnnnnnnnnnnnnnnnnnnnnnnnnnnnnnnnnnnnnnnnnnnnnnnnnnnnnnnnnnnnnnnnnnnnnnnnnnnnnnnnnnnnnnnnnnnnnnnnnnnnnnnnnnnnnnnnnnnnnnnnnnnnnnnnnnnnnnnnnnnnnnnnnnnnnnnnnnnnnnnnnnnnnnnnnnnnnnnnnnnnnnnnnnnnnnnnnnnnnnnnnnnnnnnnnnnnnnnnnnnnnnnnnnnnnnnnnnnnnnnnnnnnnnnnnnnnnnnnnnnnnnnnnnnnnnnnnnnnnnnnnnnnnnnnnnnnnnnnnnnnnnnnnnnnnnnnnnnnnnnnnnnnnnnnnnnnnnnnnnnnnnnnnnnnnnnnnnnnnnnnnnnnnnnnnnnnnnnnnnnnnnnnnnnnnnnnnnnnnnnnnnnnnnnnnnnnnnnnnnnnnnnnnnnnnnnnnnnnnnnnnnnnnnnnnnnnnnnnnnnnnnnnnnnnnnnnnnnnnnnnnnnnnnnnnnnnnnnnnnnnnnnnnnnnnnnnnnnnnnnnnnnnnnnnnnnnnnnnnnnnnnnnnnnnnnnnnnnnnnnnnnnnnnnnnnnnnnnnnnnnnnnnnnnnnnnnnnnnnnnnnnnnnnnnnnnnnnnnnnnnnnnnnnnnnnnnnnnnnnnnnnnnnnnnnnnnnnnnnnnnnnnnnnnnnnnnnnnnnnnnnnnnnnnnnnnnnnnnnnnnnnnnnnnnnnnnnnnnnnnnnnnnnnnnnnnnnnnnnnnnnnnnnnnnnnnnnnnnnnnnnnnnnnnnnnnnnnnnnnnnnnnnnnnnnnnnnnnnnnnnnnnnnnnnnnnnnnnnnnnnnnnnnnnnnnnnnnnnnnnnnnnnnnnnnnnnnnnnnnnnnnnnnnnnnnnnnnnnnnnnnnnnnnnnnnnnnnnnnnnnnnnnnnnnnnnnnnnnnnnnnnnnnnnnnnnnnnnnnnnnnnnnnnnnnnnnnnnnnnnnnnnnnnnnnnnnnnnnnnnnnnnnnnnnnnnnnnnnnnnnnnnnnnnnnnnnnnnnnnnnnnnnnnnnnnnnnnnnnnnnnnnnnnnnnnnnnnnnnnnnnnnnnnnnnnnnnnnnnnnnnnnnnnnnnnnnnnnnnnnnnnnnnnnnnnnnnnnnnnnnnnnnnnnnnnnnnnnnnnnnnnnnnnnnnnnnnnnnnnnnnnnnnnnnnnnnnnnnnnnnnnnnnnnnnnnnnnnnnnnnnnnnnnnnnnnnnnnnnnnnnnnnnnnnnnnnnnnnnnnnnnnnnnnnnnnnnnnnnnnnnnnnnnnnnnnnnnnnnnnnnnnnnnnnnnnnnnnnnnnnnnnnnnnnnnnnnnnnnnnnnnnnnnnnnnnnnnnnnnnnnnnnnnnnnnnnnnnnnnnnnnnnnnnnnnnnnnnnnnnnnnnnnnnnnnnnnnnnnnnnnnnnnnnnnnnnnnnnnnnnnnnnnnnnnnnnnnnnnnnnnnnnnnnnnnnnnnnnnnnnnnnnnnnnnnnnnnnnnnnnnnnnnnnnnnnnnnnnnnnnnnnnnnnnnnnnnnnnnnnnnnnnnnnnnnnnnnnnnnnnnnnnnnnnnnnnnnnnnnnnnnnnnnnnnnnnnnnnnnnnnnnnnnnnnnnnnnnnnnnnnnnnnnnnnnnnnnnnnnnnnnnnnnnnnnnnnnnnnnnnnnnnnnnnnnnnnnnnnnnnnnnnnnnnnnnnnnnnnnnnnnnnnnnnnnnnnnnnnnnnnnnnnnnnnnnnnnnnnnnnnnnnnnnnnnnnnnnnnnnnnnnnnnnnnnnnnnnnnnnnnnnnnnnnnnnnnnnnnnnnnnnnnnnnnnnnnnnnnnnnnnnnnnnnnnnnnnnnnnnnnnnnnnnnnnnnnnnnnnnnnnnnnnnnnnnnnnnnnnnnnnnnnnnnnnnnnnnnnnnnnnnnnnnnnnnnnnnnnnnnnnnnnnnnnnnnnnnnnnnnnnnnnnnnnnnnnnnnnnnnnnnnnnnnnnnnnnnnnnnnnnnnnnnnnnnnnnnnnnnnnnnnnnnnnnnnnnnnnnnnnnnnnnnnnnnnnnnnnnnnnnnnnnnnnnnnnnnnnnnnnnnnnnnnnnnnnnnnnnnnnnnnnnnnnnnnnnnnnnnnnnnnnnnnnnnnnnnnnnnnnnnnnnnnnnnnnnnnnnnnnnnnnnnnnnnnnnnnnnnnnnnnnnnnnnnnnnnnnnnnnnnnnnnnnnnnnnnnnnnnnnnnnnnnnnnnnnnnnnnnnnnnnnnnnnnnnnnnnnnnnnnnnnnnnnnnnnnnnnnnnnnnnnnnnnnnnnnnnnnnnnnnnnnnnnnnnnnnnnnnnnnnnnnnnnnnnnnnnnnnnnnnnnnnnnnnnnnnnnnnnnnnnnnnnnnnnnnnnnnnnnnnnnnnnnnnnnnnnnnnnnnnnnnnnnnnnnnnnnnnnnnnnnnnnnnnnnnnnnnnnnnnnnnnnnnnnnnnnnnnnnnnnnnnnnnnnnnnnnnnnnnnnnnnnnnnnnnnnnnnnnnnnnnnnnnnnnnnnnnnnnnnnnnnnnnnnnnnnnnnnnnnnnnnnnnnnnnnnnnnnnnnnnnnnnnnnnnnnnnnnnnnnnnnnnnnnnnnnnnnnnnnnnnnnnnnnnnnnnnnnnnnnnnnnnnnnnnnnnnnnnnnnnnnnnnnnnnnnnnnnnnnnnnnnnnnnnnnnnnnnnnnnnnnnnnnnnnnnnnnnnnnnnnnnnnnnnnnnnnnnnnnnnnnnnnnnnnnnnnnnnnnnnnnnnnnnnnnnnnnnnnnnnnnnnnnnnnnnnnnnnnnnnnnnnnnnnnnnnnnnnnnnnnnnnnnnnnnnnnnnnnnnnnnnnnnnnnnnnnnnnnnnnnnnnnnnnnnnnnnnnnnnnnnnnnnnnnnnnnnnnnnnnnnnnnnnnnnnnnnnnnnnnnnnnnnnnnnnnnnnnnnnnnnnnnnnnnnnnnnnnnnnnnnnnnnnnnnnnnnnnnnnnnnnnnnnnnnnnnnnnnnnnnnnnnnnnnnnnnnnnnnnnnnnnnnnnnnnnnnnnnnnnnnnnnnnnnnnnnnnnnnnnnnnnnnnnnnnnnnnnnnnnnnnnnnnnnnnnnnnnnnnnnnnnnnnnnnnnnnnnnnnnnnnnnnnnnnnnnnnnnnnnnnnnnnnnnnnnnnnnnnnnnnnnnnnnnnnnnnnnnnnnnnnnnnnnnnnnnnnnnnnnnnnnnnnnnnnnnnnnnnnnnnnnnnnnnnnnnnnnnnnnnnnnnnnnnnnnnnnnnnnnnnnnnnnnnnnnnnnnnnnnnnnnnnnnnnnnnnnnnnnnnnnnnnnnnnnnnnnnnnnnnnnnnnnnnnnnnnnnnnnnnnnnnnnnnnnnnnnnnnnnnnnnnnnnnnnnnnnnnnnnnnnnnnnnnnnnnnnnnnnnnnnnnnnnnnnnnnnnnnnnnnnnnnnnnnnnnnnnnnnnnnnnnnnnnnnnnnnnnnnnnnnnnnnnnnnnnnnnnnnnnnnnnnnnnnnnnnnnnnnnnnnnnnnnnnnnnnnnnnnnnnnnnnnnnnnnnnnnnnnnnnnnnnnnnnnnnnnnnnnnnnnnnnnnnnnnnnnnnnnnnnnnnnnnnnnnnnnnnnnnnnnnnnnnnnnnnnnnnnnnnnnnnnnnnnnnnnnnnnnnnnnnnnnnnnnnnnnnnnnnnnnnnnnnnnnnnnnnnnnnnnnnnnnnnnnnnnnnnnnnnnnnnnnnnnnnnnnnnnnnnnnnnnnnnnnnnnnnnnnnnnnnnnnnnnnnnnnnnnnnnnnnnnnnnnnnnnnnnnnnnnnnnnnnnnnnnnnnnnnnnnnnnnnnnnnnnnnnnnnnnnnnnnnnnnnnnnnnnnnnnnnnnnnnnnnnnnnnnnnnnnnnnnnnnnnnnnnnnnnnnnnnnnnnnnnnnnnnnnnnnnnnnnnnnnnnnnnnnnnnnnnnnnnnnnnnnnnnnnnnnnnnnnnnnnnnnnnnnnnnnnnnnnnnnnnnnnnnnnnnnnnnnnnnnnnnnnnnnnnnnnnnnnnnnnnnnnnnnnnnnnnnnnnnnnnnnnnnnnnnnnnnnnnnnnnnnnnnnnnnnnnnnnnnnnnnnnnnnnnnnnnnnnnnnnnnnnnnnnnnnnnnnnnnnnnnnnnnnnnnnnnnnnnnnnnnnnnnnnnnnnnnnnnnnnnnnnnnnnnnnnnnnnnnnnnnnnnnnnnnnnnnnnnnnnnnnnnnnnnnnnnnnnnnnnnnnnnnnnnnnnnnnnnnnnnnnnnnnnnnnnnnnnnnnnnnnnnnnnnnnnnnnnnnnnnnnnnnnnnnnnnnnnnnnnnnnnnnnnnnnnnnnnnnnnnnnnnnnnnnnnnnnnnnnnnnnnnnnnnnnnnnnnnnnnnnnnnnnnnnnnnnnnnnnnnnnnnnnnnnnnnnnnnnnnnnnnnnnnnnnnnnnnnnnnnnnnnnnnnnnnnnnnnnnnnnnnnnnnnnnnnnnnnnnnnnnnnnnnnnnnnnnnnnnnnnnnnnnnnnnnnnnnnnnnnnnnnnnnnnnnnnnnnnnnnnnnnnnnnnnnnnnnnnnnnnnnnnnnnnnnnnnnnnnnnnnnnnnnnnnnnnnnnnnnnnnnnnnnnnnnnnnnnnnnnnnnnnnnnnnnnnnnnnnnnnnnnnnnnnnnnnnnnnnnnnnnnnnnnnnnnnnnnnnnnnnnnnnnnnnnnnnnnnnnnnnnnnnnnnnnnnnnnnnnnnnnnnnnnnnnnnnnnnnnnnnnnnnnnnnnnnnnnnnnnnnnnnnnnnnnnnnnnnnnnnnnnnnnnnnnnnnnnnnnnnnnnnnnnnnnnnnnnnnnnnnnnnnnnnnnnnnnnnnnnnnnnnnnnnnnnnnnnnnnnnnnnnnnnnnnnnnnnnnnnnnnnnnnnnnnnnnnnnnnnnnnnnnnnnnnnnnnnnnnnnnnnnnnnnnnnnnnnnnnnnnnnnnnnnnnnnnnnnnnnnnnnnnnnnnnnnnnnnnnnnnnnnnnnnnnnnnnnnnnnnnnnnnnnnnnnnnnnnnnnnnnnnnnnnnnnnnnnnnnnnnnnnnnnnnnnnnnnnnnnnnnnnnnnnnnnnnnnnnnnnnnnnnnnnnnnnnnnnnnnnnnnnnnnnnnnnnnnnnnnnnnnnnnnnnnnnnnnnnnnnnnnnnnnnnnnnnnnnnnnnnnnnnnnnnnnnnnnnnnnnnnnnnnnnnnnnnnnnnnnnnnnnnnnnnnnnnnnnnnnnnnnnnnnnnnnnnnnnnnnnnnnnnnnnnnnnnnnnnnnnnnnnnnnnnnnnnnnnnnnnnnnnnnnnnnnnnnnnnnnnnnnnnnnnnnnnnnnnnnnnnnnnnnnnnnnnnnnnnnnnnnnnnnnnnnnnnnnnnnnnnnnnnnnnnnnnnnnnnnnnnnnnnnnnnnnnnnnnnnnnnnnnnnnnnnnnnnnnnnnnnnnnnnnnnnnnnnnnnnnnnnnnnnnnnnnnnnnnnnnnnnnnnnnnnnnnnnnnnnnnnnnnnnnnnnnnnnnnnnnnnnnnnnnnnnnnnnnnnnnnnnnnnnnnnnnnnnnnnnnnnnnnnnnnnnnnnnnnnnnnnnnnnnnnnnnnnnnnnnnnnnnnnnnnnnnnnnnnnnnnnnnnnnnnnnnnnnnnnnnnnnnnnnnnnnnnnnnnnnnnnnnnnnnnnnnnnnnnnnnnnnnnnnnnnnnnnnnnnnnnnnnnnnnnnnnnnnnnnnnnnnnnnnnnnnnnnnnnnnnnnnnnnnnnnnnnnnnnnnnnnnnnnnnnnnnnnnnnnnnnnnnnnnnnnnnnnnnnnnnnnnnnnnnnnnnnnnnnnnnnnnnnnnnnnnnnnnnnnnnnnnnnnnnnnnnnnnnnnnnnnnnnnnnnnnnnnnnnnnnnnnnnnnnnnnnnnnnnnnnnnnnnnnnnnnnnnnnnnnnnnnnnnnnnnnnnnnnnnnnnnnnnnnnnnnnnnnnnnnnnnnnnnnnnnnnnnnnnnnnnnnnnnnnnnnnnnnnnnnnnnnnnnnnnnnnnnnnnnnnnnnnnnnnnnnnnnnnnnnnnnnnnnnnnnnnnnnnnnnnnnnnnnnnnnnnnnnnnnnnnnnnnnnnnnnnnnnnnnnnnnnnnnnnnnnnnnnnnnnnnnnnnnnnnnnnnnnnnnnnnnnnnnnnnnnnnnnnnnnnnnnnnnnnnnnnnnnnnnnnnnnnnnnnnnnnnnnnnnnnnnnnnnnnnnnnnnnnnnnnnnnnnnnnnnnnnnnnnnnnnnnnnnnnnnnnnnnnnnnnnnnnnnnnnnnnnnnnnnnnnnnnnnnnnnnnnnnnnnnnnnnnnnnnnnnnnnnnnnnnnnnnnnnnnnnnnnnnnnnnnnnnnnnnnnnnnnnnnnnnnnnnnnnnnnnnnnnnnnnnnnnnnnnnnnnnnnnnnnnnnnnnnnnnnnnnnnnnnnnnnnnnnnnnnnnnnnnnnnnnnnnnnnnnnnnnnnnnnnnnnnnnnnnnnnnnnnnnnnnnnnnnnnnnnnnnnnnnnnnnnnnnnnnnnnnnnnnnnnnnnnnnnnnnnnnnnnnnnnnnnnnnnnnnnnnnnnnnnnnnnnnnnnnnnnnnnnnnnnnnnnnnnnnnnnnnnnnnnnnnnnnnnnnnnnnnnnnnnnnnnnnnnnnnnnnnnnnnnnnnnnnnnnnnnnnnnnnnnnnnnnnnnnnnnnnnnnnnnnnnnnnnnnnnnnnnnnnnnnnnnnnnnnnnnnnnnnnnnnnnnnnnnnnnnnnnnnnnnnnnnnnnnnnnnnnnnnnnnnnnnnnnnnnnnnnnnnnnnnnnnnnnnnnnnnnnnnnnnnnnnnnnnnnnnnnnnnnnnnnnnnnnnnnnnnnnnnnnnnnnnnnnnnnnnnnnnnnnnnnnnnnnnnnnnnnnnnnnnnnnnnnnnnnnnnnnnnnnnnnnnnnnnnnnnnnnnnnnnnnnnnnnnnnnnnnnnnnnnnnnnnnnnnnnnnnnnnnnnnnnnnnnnnnnnnnnnnnnnnnnnnnnnnnnnnnnnnnnnnnnnnnnnnnnnnnnnnnnnnnnnnnnnnnnnnnnnnnnnnnnnnnnnnnnnnnnnnnnnnnnnnnnnnnnnnnnnnnnnnnnnnnnnnnnnnnnnnnnnnnnnnnnnnnnnnnnnnnnnnnnnnnnnnnnnnnnnnnnnnnnnnnnnnnnnnnnnnnnnnnnnnnnnnnnnnnnnnnnnnnnnnnnnnnnnnnnnnnnnnnnnnnnnnnnnnnnnnnnnnnnnnnnnnnnnnnnnnnnnnnnnnnnnnnnnnnnnnnnnnnnnnnnnnnnnnnnnnnnnnnnnnnnnnnnnnnnnnnnnnnnnnnnnnnnnnnnnnnnnnnnnnnnnnnnnnnnnnnnnnnnnnnnnnnnnnnnnnnnnnnnnnnnnnnnnnnnnnnnnnnnnnnnnnnnnnnnnnnnnnnnnnnnnnnnnnnnnnnnnnnnnnnnnnnnnnnnnnnnnnnnnnnnnnnnnnnnnnnnnnnnnnnnnnnnnnnnnnnnnnnnnnnnnnnnnnnnnnnnnnnnnnnnnnnnnnnnnnnnnnnnnnnnnnnnnnnnnnnnnnnnnnnnnnnnnnnnnnnnnnnnnnnnnnnnnnnnnnnnnnnnnnnnnnnnnnnnnnnnnnnnnnnnnnnnnnnnnnnnnnnnnnnnnnnnnnnnnnnnnnnnnnnnnnnnnnnnnnnnnnnnnnnnnnnnnnnnnnnnnnnnnnnnnnnnnnnnnnnnnnnnnnnnnnnnnnnnnnnnnnnnnnnnnnnnnnnnnnnnnnnnnnnnnnnnnnnnnnnnnnnnnnnnnnnnnnnnnnnnnnnnnnnnnnnnnnnnnnnnnnnnnnnnnnnnnnnnnnnnnnnnnnnnnnnnnnnnnnnnnnnnnnnnnnnnnnnnnnnnnnnnnnnnnnnnnnnnnnnnnnnnnnnnnnnnnnnnnnnnnnnnnnnnnnnnnnnnnnnnnnnnnnnnnnnnnnnnnnnnnnnnnnnnnnnnnnnnnnnnnnnnnnnnnnnnnnnnnnnnnnnnnnnnnnnnnnnnnnnnnnnnnnnnnnnnnnnnnnnnnnnnnnnnnnnnnnnnnnnnnnnnnnnnnnnnnnnnnnnnnnnnnnnnnnnnnnnnnnnnnnnnnnnnnnnnnnnnnnnnnnnnnnnnnnnnnnnnnnnnnnnnnnnnnnnnnnnnnnnnnnnnnnnnnnnnnnnnnnnnnnnnnnnnnnnnnnnnnnnnnnnnnnnnnnnnnnnnnnnnnnnnnnnnnnnnnnnnnnnnnnnnnnnnnnnnnnnnnnnnnnnnnnnnnnnnnnnnnnnnnnnnnnnnnnnnnnnnnnnnnnnnnnnnnnnnnnnnnnnnnnnnnnnnnnnnnnnnnnnnnnnnnnnnnnnnnnnnnnnnnnnnnnnnnnnnnnnnnnnnnnnnnnnnnnnnnnnnnnnnnnnnnnnnnnnnnnnnnnnnnnnnnnnnnnnnnnnnnnnnnnnnnnnnnnnnnnnnnnnnnnnnnnnnnnnnnnnnnnnnnnnnnnnnnnnnnnnnnnnnnnnnnnnnnnnnnnnnnnnnnnnnnnnnnnnnnnnnnnnnnnnnnnnnnnnnnnnnnnnnnnnnnnnnnnnnnnnnnnnnnnnnnnnnnnnnnnnnnnnnnnnnnnnnnnnnnnnnnnnnnnnnnnnnnnnnnnnnnnnnnnnnnnnnnnnnnnnnnnnnnnnnnnnnnnnnnnnnnnnnnnnnnnnnnnnnnnnnnnnnnnnnnnnnnnnnnnnnnnnnnnnnnnnnnnnnnnnnnnnnnnnnnnnnnnnnnnnnnnnnnnnnnnnnnnnnnnnnnnnnnnnnnnnnnnnnnnnnnnnnnnnnnnnnnnnnnnnnnnnnnnnnnnnnnnnnnnnnnnnnnnnnnnnnnnnnnnnnnnnnnnnnnnnnnnnnnnnnnnnnnnnnnnnnnnnnnnnnnnnnnnnnnnnnnnnnnnnnnnnnnnnnnnnnnnnnnnnnnnnnnnnnnnnnnnnnnnnnnnnnnnnnnnnnnnnnnnnnnnnnnnnnnnnnnnnnnnnnnnnnnnnnnnnnnnnnnnnnnnnnnnnnnnnnnnnnnnnnnnnnnnnnnnnnnnnnnnnnnnnnnnnnnnnnnnnnnnnnnnnnnnnnnnnnnnnnnnnnnnnnnnnnnnnnnnnnnnnnnnnnnnnnnnnnnnnnnnnnnnnnnnnnnnnnnnnnnnnnnnnnnnnnnnnnnnnnnnnnnnnnnnnnnnnnnnnnnnnnnnnnnnnnnnnnnnnnnnnnnnnnnnnnnnnnnnnnnnnnnnnnnnnnnnnnnnnnnnnnnnnnnnnnnnnnnnnnnnnnnnnnnnnnnnnnnnnnnnnnnnnnnnnnnnnnnnnnnnnnnnnnnnnnnnnnnnnnnnnnnnnnnnnnnnnnnnnnnnnnnnnnnnnnnnnnnnnnnnnnnnnnnnnnnnnnnnnnnnnnnnnnnnnnnnnnnnnnnnnnnnnnnnnnnnnnnnnnnnnnnnnnnnnnnnnnnnnnnnnnnnnnnnnnnnnnnnnnnnnnnnnnnnnnnnnnnnnnnnnnnnnnnnnnnnnnnnnnnnnnnnnnnnnnnnnnnnnnnnnnnnnnnnnnnnnnnnnnnnnnnnnnnnnnnnnnnnnnnnnnnnnnnnnnnnnnnnnnnnnnnnnnnnnnnnnnnnnnnnnnnnnnnnnnnnnnnnnnnnnnnnnnnnnnnnnnnnnnnnnnnnnnnnnnnnnnnnnnnnnnnnnnnnnnnnnnnnnnnnnnnnnnnnnnnnnnnnnnnnnnnnnnnnnnnnnnnnnnnnnnnnnnnnnnnnnnnnnnnnnnnnnnnnnnnnnnnnnnnnnnnnnnnnnnnnnnnnnnnnnnnnnnnnnnnnnnnnnnnnnnnnnnnnnnnnnnnnnnnnnnnnnnnnnnnnnnnnnnnnnnnnnnnnnnnnnnnnnnnnnnnnnnnnnnnnnnnnnnnnnnnnnnnnnnnnnnnnnnnnnnnnnnnnnnnnnnnnnnnnnnnnnnnnnnnnnnnnnnnnnnnnnnnnnnnnnnnnnnnnnnnnnnnnnnnnnnnnnnnnnnnnnnnnnnnnnnnnnnnnnnnnnnnnnnnnnnnnnnnnnnnnnnnnnnnnnnnnnnnnnnnnnnnnnnnnnnnnnnnnnnnnnnnnnnnnnnnnnnnnnnnnnnnnnnnnnnnnnnnnnnnnnnnnnnnnnnnnnnnnnnnnnnnnnnnnnnnnnnnnnnnnnnnnnnnnnnnnnnnnnnnnnnnnnnnnnnnnnnnnnnnnnnnnnnnnnnnnnnnnnnnnnnnnnnnnnnnnnnnnnnnnnnnnnnnnnnnnnnnnnnnnnnnnnnnnnnnnnnnnnnnnnnnnnnnnnnnnnnnnnnnnnnnnnnnnnnnnnnnnnnnnnnnnnnnnnnnnnnnnnnnnnnnnnnnnnnnnnnnnnnnnnnnnnnnnnnnnnnnnnnnnnnnnnnnnnnnnnnnnnnnnnnnnnnnnnnnnnnnnnnnnnnnnnnnnnnnnnnnnnnnnnnnnnnnnnnnnnnnnnnnnnnnnnnnnnnnnnnnnnnnnnnnnnnnnnnnnnnnnnnnnnnnnnnnnnnnnnnnnnnnnnnnnnnnnnnnnnnnnnnnnnnnnnnnnnnnnnnnnnnnnnnnnnnnnnnnnnnnnnnnnnnnnnnnnnnnnnnnnnnnnnnnnnnnnnnnnnnnnnnnnnnnnnnnnnnnnnnnnnnnnnnnnnnnnnnnnnnnnnnnnnnnnnnnnnnnnnnnnnnnnnnnnnnnnnnnnnnnnnnnnnnnnnnnnnnnnnnnnnnnnnnnnnnnnnnnnnnnnnnnnnnnnnnnnnnnnnnnnnnnnnnnnnnnnnnnnnnnnnnnnnnnnnnnnnnnnnnnnnnnnnnnnnnnnnnnnnnnnnnnnnnnnnnnnnnnnnnnnnnnnnnnnnnnnnnnnnnnnnnnnnnnnnnnnnnnnnnnnnnnnnnnnnnnnnnnnnnnnnnnnnnnnnnnnnnnnnnnnnnnnnnnnnnnnnnnnnnnnnnnnnnnnnnnnnnnnnnnnnnnnnnnnnnnnnnnnnnnnnnnnnnnnnnnnnnnnnnnnnnnnnnnnnnnnnnnnnnnnnnnnnnnnnnnnnnnnnnnnnnnnnnnnnnnnnnnnnnnnnnnnnnnnnnnnnnnnnnnnnnnnnnnnnnnnnnnnnnnnnnnnnnnnnnnnnnnnnnnnnnnnnnnnnnnnnnnnnnnnnnnnnnnnnnnnnnnnnnnnnnnnnnnnnnnnnnnnnnnnnnnnnnnnnnnnnnnnnnnnnnnnnnnnnnnnnnnnnnnnnnnnnnnnnnnnnnnnnnnnnnnnnnnnnnnnnnnnnnnnnnnnnnnnnnnnnnnnnnnnnnnnnnnnnnnnnnnnnnnnnnnnnnnnnnnnnnnnnnnnnnnnnnnnnnnnnnnnnnnnnnnnnnnnnnnnnnnnnnnnnnnnnnnnnnnnnnnnnnnnnnnnnnnnnnnnnnnnnnnnnnnnnnnnnnnnnnnnnnnnnnnnnnnnnnnnnnnnnnnnnnnnnnnnnnnnnnnnnnnnnnnnnnnnnnnnnnnnnnnnnnnnnnnnnnnnnnnnnnnnnnnnnnnnnnnnnnnnnnnnnnnnnnnnnnnnnnnnnnnnnnnnnnnnnnnnnnnnnnnnnnnnnnnnnnnnnnnnnnnnnnnnnnnnnnnnnnnnnnnnnnnnnnnnnnnnnnnnnnnnnnnnnnnnnnnnnnnnnnnnnnnnnnnnnnnnnnnnnnnnnnnnnnnnnnnnnnnnnnnnnnnnnnnnnnnnnnnnnnnnnnnnnnnnnnnnnnnnnnnnnnnnnnnnnnnnnnnnnnnnnnnnnnnnnnnnnnnnnnnnnnnnnnnnnnnnnnnnnnnnnnnnnnnnnnnnnnnnnnnnnnnnnnnnnnnnnnnnnnnnnnnnnnnnnnnnnnnnnnnnnnnnnnnnnnnnnnnnnnnnnnnnnnnnnnnnnnnnnnnnnnnnnnnnnnnnnnnnnnnnnnnnnnnnnnnnnnnnnnnnnnnnnnnnnnnnnnnnnnnnnnnnnnnnnnnnnnnnnnnnnnnnnnnnnnnnnnnnnnnnnnnnnnnnnnnnnnnnnnnnnnnnnnnnnnnnnnnnnnnnnnnnnnnnnnnnnnnnnnnnnnnnnnnnnnnnnnnnnnnnnnnnnnnnnnnnnnnnnnnnnnnnnnnnnnnnnnnnnnnnnnnnnnnnnnnnnnnnnnnnnnnnnnnnnnnnnnnnnnnnnnnnnnnnnnnnnnnnnnnnnnnnnnnnnnnnnnnnnnnnnnnnnnnnnnnnnnnnnnnnnnnnnnnnnnnnnnnnnnnnnnnnnnnnnnnnnnnnnnnnnnnnnnnnnnnnnnnnnnnnnnnnnnnnnnnnnnnnnnnnnnnnnnnnnnnnnnnnnnnnnnnnnnnnnnnnnnnnnnnnnnnnnnnnnnnnnnnnnnnnnnnnnnnnnnnnnnnnnnnnnnnnnnnnnnnnnnnnnnnnnnnnnnnnnnnnnnnnnnnnnnnnnnnnnnnnnnnnnnnnnnnnnnnnnnnnnnnnnnnnnnnnnnnnnnnnnnnnnnnnnnnnnnnnnnnnnnnnnnnnnnnnnnnnnnnnnnnnnnnnnnnnnnnnnnnnnnnnnnnnnnnnnnnnnnnnnnnnnnnnnnnnnnnnnnnnnnnnnnnnnnnnnnnnnnnnnnnnnnnnnnnnnnnnnnnnnnnnnnnnnnnnnnnnnnnnnnnnnnnnnnnnnnnnnnnnnnnnnnnnnnnnnnnnnnnnnnnnnnnnnnnnnnnnnnnnnnnnnnnnnnnnnnnnnnnnnnnnnnnnnnnnnnnnnnnnnnnnnnnnnnnnnnnnnnnnnnnnnnnnnnnnnnnnnnnnnnnnnnnnnnnnnnnnnnnnnnnnnnnnnnnnnnnnnnnnnnnnnnnnnnnnnnnnnnnnnnnnnnnnnnnnnnnnnnnnnnnnnnnnnnnnnnnnnnnnnnnnnnnnnnnnnnnnnnnnnnnnnnnnnnnnnnnnnnnnnnnnnnnnnnnnnnnnnnnnnnnnnnnnnnnnnnnnnnnnnnnnnnnnnnnnnnnnnnnnnnnnnnnnnnnnnnnnnnnnnnnnnnnnnnnnnnnnnnnnnnnnnnnnnnnnnnnnnnnnnnnnnnnnnnnnnnnnnnnnnnnnnnnnnnnnnnnnnnnnnnnnnnnnnnnnnnnnnnnnnnnnnnnnnnnnnnnnnnnnnnnnnnnnnnnnnnnnnnnnnnnnnnnnnnnnnnnnnnnnnnnnnnnnnnnnnnnnnnnnnnnnnnnnnnnnnnnnnnnnnnnnnnnnnnnnnnnnnnnnnnnnnnnnnnnnnnnnnnnnnnnnnnnnnnnnnnnnnnnnnnnnnnnnnnnnnnnnnnnnnnnnnnnnnnnnnnnnnnnnnnnnnnnnnnnnnnnnnnnnnnnnnnnnnnnnnnnnnnnnnnnnnnnnnnnnnnnnnnnnnnnnnnnnnnnnnnnnnnnnnnnnnnnnnnnnnnnnnnnnnnnnnnnnnnnnnnnnnnnnnnnnnnnnnnnnnnnnnnnnnnnnnnnnnnnnnnnnnnnnnnnnnnnnnnnnnnnnnnnnnnnnnnnnnnnnnnnnnnnnnnnnnnnnnnnnnnnnnnnnnnnnnnnnnnnnnnnnnnnnnnnnnnnnnnnnnnnnnnnnnnnnnnnnnnnnnnnnnnnnnnnnnnnnnnnnnnnnnnnnnnnnnnnnnnnnnnnnnnnnnnnnnnnnnnnnnnnnnnnnnnnnnnnnnnnnnnnnnnnnnnnnnnnnnnnnnnnnnnnnnnnnnnnnnnnnnnnnnnnnnnnnnnnnnnnnnnnnnnnnnnnnnnnnnnnnnnnnnnnnnnnnnnnnnnnnnnnnnnnnnnnnnnnnnnnnnnnnnnnnnnnnnnnnnnnnnnnnnnnnnnnnnnnnnnnnnnnnnnnnnnnnnnnnnnnnnnnnnnnnnnnnnnnnnnnnnnnnnnnnnnnnnnnnnnnnnnnnnnnnnnnnnnnnnnnnnnnnnnnnnnnnnnnnnnnnnnnnnnnnnnnnnnnnnnnnnnnnnnnnnnnnnnnnnnnnnnnnnnnnnnnnnnnnnnnnnnnnnnnnnnnnnnnnnnnnnnnnnnnnnnnnnnnnnnnnnnnnnnnnnnnnnnnnnnnnnnnnnnnnnnnnnnnnnnnnnnnnnnnnnnnnnnnnnnnnnnnnnnnnnnnnnnnnnnnnnnnnnnnnnnnnnnnnnnnnnnnnnnnnnnnnnnnnnnnnnnnnnnnnnnnnnnnnnnnnnnnnnnnnnnnnnnnnnnnnnnnnnnnnnnnnnnnnnnnnnnnnnnnnnnnnnnnnnnnnnnnnnnnnnnnnnnnnnnnnnnnnnnnnnnnnnnnnnnnnnnnnnnnnnnnnnnnnnnnnnnnnnnnnnnnnnnnnnnnnnnnnnnnnnnnnnnnnnnnnnnnnnnnnnnnnnnnnnnnnnnnnnnnnnnnnnnnnnnnnnnnnnnnnnnnnnnnnnnnnnnnnnnnnnnnnnnnnnnnnnnnnnnnnnnnnnnnnnnnnnnnnnnnnnnnnnnnnnnnnnnnnnnnnnnnnnnnnnnnnnnnnnnnnnnnnnnnnnnnnnnnnnnnnnnnnnnnnnnnnnnnnnnnnnnnnnnnnnnnnnnnnnnnnnnnnnnnnnnnnnnnnnnnnnnnnnnnnnnnnnnnnnnnnnnnnnnnnnnnnnnnnnnnnnnnnnnnnnnnnnnnnnnnnnnnnnnnnnnnnnnnnnnnnnnnnnnnnnnnnnnnnnnnnnnnnnnnnnnnnnnnnnnnnnnnnnnnnnnnnnnnnnnnnnnnnnnnnnnnnnnnnnnnnnnnnnnnnnnnnnnnnnnnnnnnnnnnnnnnnnnnnnnnnnnnnnnnnnnnnnnnnnnnnnnnnnnnnnnnnnnnnnnnnnnnnnnnnnnnnnnnnnnnnnnnnnnnnnnnnnnnnnnnnnnnnnnnnnnnnnnnnnnnnnnnnnnnnnnnnnnnnnnnnnnnnnnnnnnnnnnnnnnnnnnnnnnnnnnnnnnnnnnnnnnnnnnnnnnnnnnnnnnnnnnnnnnnnnnnnnnnnnnnnnnnnnnnnnnnnnnnnnnnnnnnnnnnnnnnnnnnnnnnnnnnnnnnnnnnnnnnnnnnnnnnnnnnnnnnnnnnnnnnnnnnnnnnnnnnnnnnnnnnnnnnnnnnnnnnnnnnnnnnnnnnnnnnnnnnnnnnnnnnnnnnnnnnnnnnnnnnnnnnnnnnnnnnnnnnnnnnnnnnnnnnnnnnnnnnnnnnnnnnnnnnnnnnnnnnnnnnnnnnnnnnnnnnnnnnnnnnnnnnnnnnnnnnnnnnnnnnnnnnnnnnnnnnnnnnnnnnnnnnnnnnnnnnnnnnnnnnnnnnnnnnnnnnnnnnnnnnnnnnnnnnnnnnnnnnnnnnnnnnnnnnnnnnnnnnnnnnnnnnnnnnnnnnnnnnnnnnnnnnnnnnnnnnnnnnnnnnnnnnnnnnnnnnnnnnnnnnnnnnnnnnnnnnnnnnnnnnnnnnnnnnnnnnnnnnnnnnnnnnnnnnnnnnnnnnnnnnnnnnnnnnnnnnnnnnnnnnnnnnnnnnnnnnnnnnnnnnnnnnnnnnnnnnnnnnnnnnnnnnnnnnnnnnnnnnnnnnnnnnnnnnnnnnnnnnnnnnnnnnnnnnnnnnnnnnnnnnnnnnnnnnnnnnnnnnnnnnnnnnnnnnnnnnnnnnnnnnnnnnnnnnnnnnnnnnnnnnnnnnnnnnnnnnnnnnnnnnnnnnnnnnnnnnnnnnnnnnnnnnnnnnnnnnnnnnnnnnnnnnnnnnnnnnnnnnnnnnnnnnnnnnnnnnnnnnnnnnnnnnnnnnnnnnnnnnnnnnnnnnnnnnnnnnnnnnnnnnnnnnnnnnnnnnnnnnnnnnnnnnnnnnnnnnnnnnnnnnnnnnnnnnnnnnnnnnnnnnnnnnnnnnnnnnnnnnnnnnnnnnnnnnnnnnnnnnnnnnnnnnnnnnnnnnnnnnnnnnnnnnnnnnnnnnnnnnnnnnnnnnnnnnnnnnnnnnnnnnnnnnnnnnnnnnnnnnnnnnnnnnnnnnnnnnnnnnnnnnnnnnnnnnnnnnnnnnnnnnnnnnnnnnnnnnnnnnnnnnnnnnnnnnnnnnnnnnnnnnnnnnnnnnnnnnnnnnnnnnnnnnnnnnnnnnnnnnnnnnnnnnnnnnnnnnnnnnnnnnnnnnnnnnnnnnnnnnnnnnnnnnnnnnnnnnnnnnnnnnnnnnnnnnnnnnnnnnnnnnnnnnnnnnnnnnnnnnnnnnnnnnnnnnnnnnnnnnnnnnnnnnnnnnnnnnnnnnnnnnnnnnnnnnnnnnnnnnnnnnnnnnnnnnnnnnnnnnnnnnnnnnnnnnnnnnnnnnnnnnnnnnnnnnnnnnnnnnnnnnnnnnnnnnnnnnnnnnnnnnnnnnnnnnnnnnnnnnnnnnnnnnnnnnnnnnnnnnnnnnnnnnnnnnnnnnnnnnnnnnnnnnnnnnnnnnnnnnnnnnnnnnnnnnnnnnnnnnnnnnnnnnnnnnnnnnnnnnnnnnnnnnnnnnnnnnnnnnnnnnnnnnnnnnnacactgagccttcaatgaacttccggtccatgtaaaagcacacctgtctgcatggcagcagtaggacctcacaatgtggattgtgccttcacccaggaatgtttatgccctatcgccatggtgatgggattagaaatctcctgcccttggtcataagtgccactgtctgggctgagtttttcaaaggtcagagcagattgaacttttctgggttcattttccctgattttgatttttcttaaggggaacctgtgttcctccaatcgaggtatgttcatactggcctgtcaaatgcgatcttttcaaattattaatgctttcaaaatttgttatttaaaaaattatcctctgtattttccatatgcagttataaatatgtttcatggttatgttttattcctcaatttacatatttgattattgtaccaagcagagtacctttgaaatttttgttcatttaaaaaatacggatcttggctcaggcctgtaatcccagcaatttcggaggccaaagcaagaggatcacaaggtgaggagatcaagaccatcctggccaatacagtgaagccctgtctctactaaaactacaaaaaattatccaggcgtggtggcagctggtgcagtcccagtgtggtgtagtcccagctacctgggaggctgaggcaggacaatcacttgaacccgtgaggtaaagtttgcagtgagccaacatggcgccattgcactccagcctgtgaaacagaacaaaactctgtctaaaaaaaaattatatatatataataaatgacatacgtaatatataatatatatcatatataatacgtcctaatatatgatatatataatatatattctatgtcatttacatatattatatataatatatatgacatagaatatatattatatgaaatatataatttattgtatataaaatgttatatatattatatattatatataatatataatatatatgataatattatataatacatattacatatatgtcattatattatatatatgatatataatatactatatataatatatttcatatgtaatatgatatatattatatatgatataaattacatatatgatatatattatatattatgtgatatatatgacatgtaatatatatgacatatataaaatatgatatatattacatattatatattataagatatgtaactatatattgtattatatatcataatatattatatattataattattatttaatataatattatatattatataatatatattatattatattattattctatataatatatattatatattatatgtttaatataatatgtaatataatatacttatattatgatatattatatatcatgtatattatacactatatattatatataatataaactatatattatatataatatatagtatatattatatactatatattatatatagtatatattatatataatataaactatatgtattatatattatataatatataatgtatatagtatatattatataatatataatgtatatagtatatattatatattatattatataattatatataattatataaatatatataattatatatattatacaatatataattatatattttatattatattatatataatatatataatatcaggatgcaggatgtaaaaggaaatatctataatatatattatatatattttatattatattatctatacttaaatatatatataaatatgtggggatgtcctgtttcgaatctcataacttattttaagaagcacagcataataatatgtgggcttgggattcagtttttgaaacagaacaatgagccttcaatgaccttcctgtacatgtaaaagcacaactgtctgcatggcagcagttggacctcacaatgtggattgtgccttcaccatggaatgtttataccctatcgccatggtgatgggattagggatctcctgcccttggtcctaagtgccactgtctgtgctgaatttttcgaaggtcacagcagattgaacatttgtggtttcattttccctgattttgatttttcttatggggaacctgtgttgctgcattcaaggtatgttcatactggcctgtcaaatgcgaactcttcaaattactagttaatgctttcaaaatatcctatttaaaaaattatccactgtattttccatatgcagttataaacatgtttcatggttacgttttattaatcaatttatatatttgattattgtaccaagcagagtaccttagaaatttttcttcatttaaaaaatatgtatcttggctcaggcctgtaatcccagcacgttgggaggccaaggcaagaggttaacaaggtgaggagatcaagaccatcgtggccaaaatagtgagaccctgtctctactaaaaatacaaaaaattagccaggcatgggggcagctggtgtactcccagtgtggtgtcgtcccagctacctgggaggctgaggcaggacaatcgcatgaacctgtgaggcagaggttgcagtgagccaagatggcgccattgcactccagcctgtgaaacagaacaagactctgtctaaaaaaaaattatatatatataatatatatcatatatattatacattatataatacatatgtaatatattatatataatatatattatatgtcatagtatatataatatatataatatacattatatgtcagtacatatatatattatgtcagtatatataatacataccatatgtcatatatattttatatttattatatatattaatgtatatataatatacattattatatattatatatgaaattatataatataattatatttaatataagatatatataatatgatatataacatatataatatatatcttttgcgatatataatatgtatataatttataatatatatcatatatgatatataatatgtatatattttataatatatatcaaattatatataatatgcatatattttatatatatcatatatataagataattatacatataataattatactgtatataacaaattatataaattattctatataatatataataatatatatgtaattatataataattatatgtataatatataacataatatataatatacattatatattatatataatatataatatacattatatattatatataatatataatatacattatatattatatataatatataatatacattatatattatatataatgtataatatacattatatattatatataatatacattatacattatatataatatataatatgtattttaatatatatgtaacatatattgtataaaataaaatatataatatataatacgtaataatatataatacatagtatattatgatatatagaaaatataatgtaattatatataatatataattatatataatatattatatagttatataacaaaacatacataatatatatcatgttatatataatatataacatatatattgtatgtcatatattatatgttatatatcatatataatatattataaatctatatatcgtatattatatattatatatcttatcttacataccatatatatcatatatcatgtatataatacatttataatatgtatgctatatattatgtgtaatatatggtatacattatattatatatattataaaatatcttatatattatatataatatatattatacataatatataatatatatttaatatatattacacataatatatatttaatatatatattacacataatatatatttaatatatatattacacataatatatataatatatattacatatatgtcaaaatataatgtatattgtatgtcattttgtatatttaataattgtatattattatatattattatattatatataatatatataagatgcatcatataaaagggaattatatatatgttatatatattaaatatataattaatatctgtaatatatataacatatatatatatttgtgtgtgccctatttcccatctcataacttagtttaagaagcacagcataataatgtgtggggttgggattcagtttttgaaacaaaacactgagccttcaatgaacttaatgtacatgtaaaacgactcctgtctcccaggcagcagttggacctcacaatgtggattgtgccttcaccctggaatgtttatgccctatcgccatggtgatgggattagggatctcctgcccttggtcctaagtgccactgtctgtgctgagtttttcgaaggtcagagcagattgaacctttgtggtttcattttcctaattgtcatttttcttatggggaacctgtgttgctgcattcaaggtatgttcnnnnnnnnnnnnnnnnnnnnnnnnnnnnnnnnnnnnnnnnnnnnnnnnnnnnnnnnnnnnnnnnnnnnnnnnnnnnnnnnnnnnnnnnnnnnnnnnnnnnnnnnnnnnnnnnnnnnnnnnnnnnnnnnnnnnnnnnnnnnnnnnnnnnnnnnnnnnnnnnnnnnnnnnnnnnnnnnnnnnnnnnnnnnnnnnnnnnnnnnnnnnnnnnnnnnnnnnnnnnnnnnnnnnnnnnnnnnnnnnnnnnnnnnnnnnnnnnnnnnnnnnnnnnnnnnnnnnnnnnnnnnnnnnnnnnnnnnnnnnnnnnnnnnnnnnnnnnnnnnnnnnnnnnnnnnnnnnnnnnnnnnnnnnnnnnnnnnnnnnnnnnnnnnnnnnnnnnnnnnnnnnnnnnnnnnnnnnnnnnnnnnnnnnnnnnnnnnnnnnnnnnnnnnnnnnnnnnnnnnnnnnnnnnnnnnnnnnnnnnnnnnnnnnnnnnnnnnnnnnnnnnnnnnnnnnnnnnnnnnnnnnnnnnnnnnnnnnnnnnnnnnnnnnnnnnnnnnnnnnnnnnnnnnnnnnnnnnnnnnnnnnnnnnnnnnnnnnnnnnnnnnnnnnnnnnnnnnnnnnnnnnnnnnnnnnnnnnnnnnnnnnnnnnnnnnnnnnnnnnnnnnnnnnnnnnnnnnnnnnnnnnnnnnnnnnnnnnnnnnnnnnnnnnnnnnnnnnnnnnnnnnnnnnnnnnnnnnnnnnnnnnnnnnnnnnnnnnnnnnnnnnnnnnnnnnnnnnnnnnnnnnnnnnnnnnnnnnnnnnnnnnnnnnnnnnnnnnnnnnnnnnnnnnnnnnnnnnnnnnnnnnnnnnnnnnnnnnnnnnnnnnnnnnnnnnnnnnnnnnnnnnnnnnnnnnnnnnnnnnnnnnnnnnnnnnnnnnnnnnnnnnnnnnnnnnnnnnnnnnnnnnnnnnnnnnnnnnnnnnnnnnnnnnnnnnnnnnnnnnnnnnnnnnnnnnnnnnnnnnnnnnnnnnnnnnnnnnnnnnnnnnnnnnnnnnnnnnnnnnnnnnnnnnnnnnnnnnnnnnnnnnnnnnnnnnnnnnnnnnnnnnnnnnnnnnnnnnnnnnnnnnnnnnnnnnnnnnnnnnnnnnnnnnnnnnnnnnnnnnnnnnnnnnnnnnnnnnnnnnnnnnnnnnnnnnnnnnnnnnnnnnnnnnnnnnnnnnnnnnnnnnnnnnnnnnnnnnnnnnnnnnnnnnnnnnnnnnnnnnnnnnnnnnnnnnnnnnnnnnnnnnnnnnnnnnnnnnnnnnnnnnnnnnnnnnnnnnnnnnnnnnnnnnnnnnnnnnnnnnnnnnnnnnnnnnnnnnnnnnnnnnnnnnnnnnnnnnnnnnnnnnnnnnnnnnnnnnnnnnnnnnnnnnnnnnnnnnnnnnnnnnnnnnnnnnnnnnnnnnnnnnnnnnnnnnnnnnnnnnnnnnnnnnnnnnnnnnnnnnnnnnnnnnnnnnnnnnnnnnnnnnnnnnnnnnnnnnnnnnnnnnnnnnnnnnnnnnnnnnnnnnnnnnnnnnnnnnnnnnnnnnnnnnnnnnnnnnnnnnnnnnnnnnnnnnnnnnnnnnnnnnnnnnnnnnnnnnnnnnnnnnnnnnnnnnnnnnnnnnnnnnnnnnnnnnnnnnnnnnnnnnnnnnnnnnnnnnnnnnnnnnnnnnnnnnnnnnnnnnnnnnnnnnnnnnnnnnnnnnnnnnnnnnnnnnnnnnnnnnnnnnnnnnnnnnnnnnnnnnnnnnnnnnnnnnnnnnnnnnnnnnnnnnnnnnnnnnnnnnnnnnnnnnnnnnnnnnnnnnnnnnnnnnnnnnnnnnnnnnnnnnnnnnnnnnnnnnnnnnnnnnnnnnnnnnnnnnnnnnnnnnnnnnnnnnnnnnnnnnnnnnnnnnnnnnnnnnnnnnnnnnnnnnnnnnnnnnnnnnnnnnnnnnnnnnnnnnnnnnnnnnnnnnnnnnnnnnnnnnnnnnnnnnnnnnnnnnnnnnnnnnnnnnnnnnnnnnnnnnnnnnnnnnnnnnnnnnnnnnnnnnnnnnnnnnnnnnnnnnnnnnnnnnnnnnnnnnnnnnnnnnnnnnnnnnnnnnnnnnnnnnnnnnnnnnnnnnnnnnnnnnnnnnnnnnnnnnnnnnnnnnnnnnnnnnnnnnnnnnnnnnnnnnnnnnnnnnnnnnnnnnnnnnnnnnnnnnnnnnnnnnnnnnnnnnnnnnnnnnnnnnnnnnnnnnnnnnnnnnnnnnnnnnnnnnnnnnnnnnnnnnnnnnnnnnnnnnnnnnnnnnnnnnnnnnnnnnnnnnnnnnnnnnnnnnnnnnnnnnnnnnnnnnnnnnnnnnnnnnnnnnnnnnnnnnnnnnnnnnnnnnnnnnnnnnnnnnnnnnnnnnnnnnnnnnnnnnnnnnnnnnnnnnnnnnnnnnnnnnnnnnnnnnnnnnnnnnnnnnnnnnnnnnnnnnnnnnnnnnnnnnnnnnnnnnnnnnnnnnnnnnnnnnnnnnnnnnnnnnnnnnnnnnnnnnnnnnnnnnnnnnnnnnnnnnnnnnnnnnnnnnnnnnnnnnnnnnnnnnnnnnnnnnnnnnnnnnnnnnnnnnnnnnnnnnnnnnnnnnnnnnnnnnnnnnnnnnnnnnnnnnnnnnnnnnnnnnnnnnnnnnnnnnnnnnnnnnnnnnnnnnnnnnnnnnnnnnnnnnnnnnnnnnnnnnnnnnnnnnnnnnnnnnnnnnnnnnnnnnnnnnnnnnnnnnnnnnnnnnnnnnnnnnnnnnnnnnnnnnnnnnnnnnnnnnnnnnnnnnnnnnnnnnnnnnnnnnnnnnnnnnnnnnnnnnnnnnnnnnnnnnnnnnnnnnnnnnnnnnnnnnnnnnnnnnnnnnnnnnnnnnnnnnnnnnnnnnnnnnnnnnnnnnnnnnnnnnnnnnnnnnnnnnnnnnnnnnnnnnnnnnnnnnnnnnnnnnnnnnnnnnnnnnnnnnnnnnnnnnnnnnnnnnnnnnnnnnnnnnnnnnnnnnnnnnnnnnnnnnnnnnnnnnnnnnnnnnnnnnnnnnnnnnnnnnnnnnnnnnnnnnnnnnnnnnnnnnnnnnnnnnnnnnnnnnnnnnnnnnnnnnnnnnnnnnnnnnnnnnnnnnnnnnnnnnnnnnnnnnnnnnnnnnnnnnnnnnnnnnnnnnnnnnnnnnnnnnnnnnnnnnnnnnnnnnnnnnnnnnnnnnnnnnnnnnnnnnnnnnnnnnnnnnnnnnnnnnnnnnnnnnnnnnnnnnnnnnnnnnnnnnnnnnnnnnnnnnnnnnnnnnnnnnnnnnnnnnnnnnnnnnnnnnnnnnnnnnnnnnnnnnnnnnnnnnnnnnnnnnnnnnnnnnnnnnnnnnnnnnnnnnnnnnnnnnnnnnnnnnnnnnnnnnnnnnnnnnnnnnnnnnnnnnnnnnnnnnnnnnnnnnnnnnnnnnnnnnnnnnnnnnnnnnnnnnnnnnnnnnnnnnnnnnnnnnnnnnnnnnnnnnnnnnnnnnnnnnnnnnnnnnnnnnnnnnnnnnnnnnnnnnnnnnnnnnnnnnnnnnnnnnnnnnnnnnnnnnnnnnnnnnnnnnnnnnnnnnnnnnnnnnnnnnnnnnnnnnnnnnnnnnnnnnnnnnnnnnnnnnnnnnnnnnnnnnnnnnnnnnnnnnnnnnnnnnnnnnnnnnnnnnnnnnnnnnnnnnnnnnnnnnnnnnnnnnnnnnnnnnnnnnnnnnnnnnnnnnnnnnnnnnnnnnnnnnnnnnnnnnnnnnnnnnnnnnnnnnnnnnnnnnnnnnnnnnnnnnnnnnnnnnnnnnnnnnnnnnnnnnnnnnnnnnnnnnnnnnnnnnnnnnnnnnnnnnnnnnnnnnnnnnnnnnnnnnnnnnnnnnnnnnnnnnnnnnnnnnnnnnnnnnnnnnnnnnnnnnnnnnnnnnnnnnnnnnnnnnnnnnnnnnnnnnnnnnnnnnnnnnnnnnnnnnnnnnnnnnnnnnnnnnnnnnnnnnnnnnnnnnnnnnnnnnnnnnnnnnnnnnnnnnnnnnnnnnnnnnnnnnnnnnnnnnnnnnnnnnnnnnnnnnnnnnnnnnnnnnnnnnnnnnnnnnnnnnnnnnnnnnnnnnnnnnnnnnnnnnnnnnnnnnnnnnnnnnnnnnnnnnnnnnnnnnnnnnnnnnnnnnnnnnnnnnnnnnnnnnnnnnnnnnnnnnnnnnnnnnnnnnnnnnnnnnnnnnnnnnnnnnnnnnnnnnnnnnnnnnnnnnnnnnnnnnnnnnnnnnnnnnnnnnnnnnnnnnnnnnnnnnnnnnnnnnnnnnnnnnnnnnnnnnnnnnnnnnnnnnnnnnnnnnnnnnnnnnnnnnnnnnnnnnnnnnnnnnnnnnnnnnnnnnnnnnnnnnnnnnnnnnnnnnnnnnnnnnnnnnnnnnnnnnnnnnnnnnnnnnnnnnnnnnnnnnnnnnnnnnnnnnnnnnnnnnnnnnnnnnnnnnnnnnnnnnnnnnnnnnnnnnnnnnnnnnnnnnnnnnnnnnnnnnnnnnnnnnnnnnnnnnnnnnnnnnnnnnnnnnnnnnnnnnnnnnnnnnnnnnnnnnnnnnnnnnnnnnnnnnnnnnnnnnnnnnnnnnnnnnnnnnnnnnnnnnnnnnnnnnnnnnnnnnnnnnnnnnnnnnnnnnnnnnnnnnnnnnnnnnnnnnnnnnnnnnnnnnnnnnnnnnnnnnnnnnnnnnnnnnnnnnnnnnnnnnnnnnnnnnnnnnnnnnnnnnnnnnnnnnnnnnnnnnnnnnnnnnnnnnnnnnnnnnnnnnnnnnnnnnnnnnnnnnnnnnnnnnnnnnnnnnnnnnnnnnnnnnnnnnnnnnnnnnnnnnnnnnnnnnnnnnnnnnnnnnnnnnnnnnnnnnnnnnnnnnnnnnnnnnnnnnnnnnnnnnnnnnnnnnnnnnnnnnnnnnnnnnnnnnnnnnnnnnnnnnnnnnnnnnnnnnnnnnnnnnnnnnnnnnnnnnnnnnnnnnnnnnnnnnnnnnnnnnnnnnnnnnnnnnnnnnnnnnnnnnnnnnnnnnnnnnnnnnnnnnnnnnnnnnnnnnnnnnnnnnnnnnnnnnnnnnnnnnnnnnnnnnnnnnnnnnnnnnnnnnnnnnnnnnnnnnnnnnnnnnnnnnnnnnnnnnnnnnnnnnnnnnnnnnnnnnnnnnnnnnnnnnnnnnnnnnnnnnnnnnnnnnnnnnnnnnnnnnnnnnnnnnnnnnnnnnnnnnnnnnnnnnnnnnnnnnnnnnnnnnnnnnnnnnnnnnnnnnnnnnnnnnnnnnnnnnnnnnnnnnnnnnnnnnnnnnnnnnnnnnnnnnnnnnnnnnnnnnnnnnnnnnnnnnnnnnnnnnnnnnnnnnnnnnnnnnnnnnnnnnnnnnnnnnnnnnnnnnnnnnnnnnnnnnnnnnnnnnnnnnnnnnnnnnnnnnnnnnnnnnnnnnnnnnnnnnnnnnnnnnnnnnnnnnnnnnnnnnnnnnnnnnnnnnnnnnnnnnnnnnnnnnnnnnnnnnnnnnnnnnnnnnnnnnnnnnnnnnnnnnnnnnnnnnnnnnnnnnnnnnnnnnnnnnnnnnnnnnnnnnnnnnnnnnnnnnnnnnnnnnnnnnnnnnnnnnnnnnnnnnnnnnnnnnnnnnnnnnnnnnnnnnnnnnnnnnnnnnnnnnnnnnnnnnnnnnnnnnnnnnnnnnnnnnnnnnnnnnnnnnnnnnnnnnnnnnnnnnnnnnnnnnnnnnnnnnnnnnnnnnnnnnnnnnnnnnnnnnnnnnnnnnnnnnnnnnnnnnnnnnnnnnnnnnnnnnnnnnnnnnnnnnnnnnnnnnnnnnnnnnnnnnnnnnnnnnnnnnnnnnnnnnnnnnnnnnnnnnnnnnnnnnnnnnnnnnnnnnnnnnnnnnnnnnnnnnnnnnnnnnnnnnnnnnnnnnnnnnnnnnnnnnnnnnnnnnnnnnnnnnnnnnnnnnnnnnnnnnnnnnnnnnnnnnnnnnnnnnnnnnnnnnnnnnnnnnnnnnnnnnnnnnnnnnnnnnnnnnnnnnnnnnnnnnnnnnnnnnnnnnnnnnnnnnnnnnnnnnnnnnnnnnnnnnnnnnnnnnnnnnnnnnnnnnnnnnnnnnnnnnnnnnnnnnnnnnnnnnnnnnnnnnnnnnnnnnnnnnnnnnnnnnnnnnnnnnnnnnnnnnnnnnnnnnnnnnnnnnnnnnnnnnnnnnnnnnnnnnnnnnnnnnnnnnnnnnnnnnnnnnnnnnnnnnnnnnnnnnnnnnnnnnnnnnnnnnnnnnnnnnnnnnnnnnnnnnnnnnnnnnnnnnnnnnnnnnnnnnnnnnnnnnnnnnnnnnnnnnnnnnnnnnnnnnnnnnnnnnnnnnnnnnnnnnnnnnnnnnnnnnnnnnnnnnnnnnnnnnnnnnnnnnnnnnnnnnnnnnnnnnnnnnnnnnnnnnnnnnnnnnnnnnnnnnnnnnnnnnnnnnnnnnnnnnnnnnnnnnnnnnnnnnnnnnnnnnnnnnnnnnnnnnnnnnnnnnnnnnnnnnnnnnnnnnnnnnnnnnnnnnnnnnnnnnnnnnnnnnnnnnnnnnnnnnnnnnnnnnnnnnnnnnnnnnnnnnnnnnnnnnnnnnnnnnnnnnnnnnnnnnnnnnnnnnnnnnnnnnnnnnnnnnnnnnnnnnnnnnnnnnnnnnnnnnnnnnnnnnnnnnnnnnnnnnnnnnnnnnnnnnnnnnnnnnnnnnnnnnnnnnnnnnnnnnnnnnnnnnnnnnnnnnnnnnnnnnnnnnnnnnnnnnnnnnnnnnnnnnnnnnnnnnnnnnnnnnnnnnnnnnnnnnnnnnnnnnnnnnnnnnnnnnnnnnnnnnnnnnnnnnnnnnnnnnnnnnnnnnnnnnnnnnnnnnnnnnnnnnnnnnnnnnnnnnnnnnnnnnnnnnnnnnnnnnnnnnnnnnnnnnnnnnnnnnnnnnnnnnnnnnnnnnnnnnnnnnnnnnnnnnnnnnnnnnnnnnnnnnnnnnnnnnnnnnnnnnnnnnnnnnnnnnnnnnnnnnnnnnnnnnnnnnnnnnnnnnnnnnnnnnnnnnnnnnnnnnnnnnnnnnnnnnnnnnnnnnnnnnnnnnnnnnnnnnnnnnnnnnnnnnnnnnnnnnnnnnnnnnnnnnnnnnnnnnnnnnnnnnnnnnnnnnnnnnnnnnnnnnnnnnnnnnnnnnnnnnnnnnnnnnnnnnnnnnnnnnnnnnnnnnnnnnnnnnnnnnnnnnnnnnnnnnnnnnnnnnnnnnnnnnnnnnnnnnnnnnnnnnnnnnnnnnnnnnnnnnnnnnnnnnnnnnnnnnnnnnnnnnnnnnnnnnnnnnnnnnnnnnnnnnnnnnnnnnnnnnnnnnnnnnnnnnnnnnnnnnnnnnnnnnnnnnnnnnnnnnnnnnnnnnnnnnnnnnnnnnnnnnnnnnnnnnnnnnnnnnnnnnnnnnnnnnnnnnnnnnnnnnnnnnnnnnnnnnnnnnnnnnnnnnnnnnnnnnnnnnnnnnnnnnnnnnnnnnnnnnnnnnnnnnnnnnnnnnnnnnnnnnnnnnnnnnnnnnnnnnnnnnnnnnnnnnnnnnnnnnnnnnnnnnnnnnnnnnnnnnnnnnnnnnnnnnnnnnnnnnnnnnnnnnnnnnnnnnnnnnnnnnnnnnnnnnnnnnnnnnnnnnnnnnnnnnnnnnnnnnnnnnnnnnnnnnnnnnnnnnnnnnnnnnnnnnnnnnnnnnnnnnnnnnnnnnnnnnnnnnnnnnnnnnnnnnnnnnnnnnnnnnnnnnnnnnnnnnnnnnnnnnnnnnnnnnnnnnnnnnnnnnnnnnnnnnnnnnnnnnnnnnnnnnnnnnnnnnnnnnnnnnnnnnnnnnnnnnnnnnnnnnnnnnnnnnnnnnnnnnnnnnnnnnnnnnnnnnnnnnnnnnnnnnnnnnnnnnnnnnnnnnnnnnnnnnnnnnnnnnnnnnnnnnnnnnnnnnnnnnnnnnnnnnnnnnnnnnnnnnnnnnnnnnnnnnnnnnnnnnnnnnnnnnnnnnnnnnnnnnnnnnnnnnnnnnnnnnnnnnnnnnnnnnnnnnnnnnnnnnnnnnnnnnnnnnnnnnnnnnnnnnnnnnnnnnnnnnnnnnnnnnnnnnnnnnnnnnnnnnnnnnnnnnnnnnnnnnnnnnnnnnnnnnnnnnnnnnnnnnnnnnnnnnnnnnnnnnnnnnnnnnnnnnnnnnnnnnnnnnnnnnnnnnnnnnnnnnnnnnnnnnnnnnnnnnnnnnnnnnnnnnnnnnnnnnnnnnnnnnnnnnnnnnnnnnnnnnnnnnnnnnnnnnnnnnnnnnnnnnnnnnnnnnnnnnnnnnnnnnnnnnnnnnnnnnnnnnnnnnnnnnnnnnnnnnnnnnnnnnnnnnnnnnnnnnnnnnnnnnnnnnnnnnnnnnnnnnnnnnnnnnnnnnnnnnnnnnnnnnnnnnnnnnnnnnnnnnnnnnnnnnnnnnnnnnnnnnnnnnnnnnnnnnnnnnnnnnnnnnnnnnnnnnnnnnnnnnnnnnnnnnnnnnnnnnnnnnnnnnnnnnnnnnnnnnnnnnnnnnnnnnnnnnnnnnnnnnnnnnnnnnnnnnnnnnnnnnnnnnnnnnnnnnnnnnnnnnnnnnnnnnnnnnnnnnnnnnnnnnnnnnnnnnnnnnnnnnnnnnnnnnnnnnnnnnnnnnnnnnnnnnnnnnnnnnnnnnnnnnnnnnnnnnnnnnnnnnnnnnnnnnnnnnnnnnnnnnnnnnnnnnnnnnnnnnnnnnnnnnnnnnnnnnnnnnnnnnnnnnnnnnnnnnnnnnnnnnnnnnnnnnnnnnnnnnnnnnnnnnnnnnnnnnnnnnnnnnnnnnnnnnnnnnnnnnnnnnnnnnnnnnnnnnnnnnnnnnnnnnnnnnnnnnnnnnnnnnnnnnnnnnnnnnnnnnnnnnnnnnnnnnnnnnnnnnnnnnnnnnnnnnnnnnnnnnnnnnnnnnnnnnnnnnnnnnnnnnnnnnnnnnnnnnnnnnnnnnnnnnnnnnnnnnnnnnnnnnnnnnnnnnnnnnnnnnnnnnnnnnnnnnnnnnnnnnnnnnnnnnnnnnnnnnnnnnnnnnnnnnnnnnnnnnnnnnnnnnnnnnnnnnnnnnnnnnnnnnnnnnnnnnnnnnnnnnnnnnnnnnnnnnnnnnnnnnnnnnnnnnnnnnnnnnnnnnnnnnnnnnnnnnnnnnnnnnnnnnnnnnnnnnnnnnnnnnnnnnnnnnnnnnnnnnnnnnnnnnnnnnnnnnnnnnnnnnnnnnnnnnnnnnnnnnnnnnnnnnnnnnnnnnnnnnnnnnnnnnnnnnnnnnnnnnnnnnnnnnnnnnnnnnnnnnnnnnnnnnnnnnnnnnnnnnnnnnnnnnnnnnnnnnnnnnnnnnnnnnnnnnnnnnnnnnnnnnnnnnnnnnnnnnnnnnnnnnnnnnnnnnnnnnnnnnnnnnnnnnnnnnnnnnnnnnnnnnnnnnnnnnnnnnnnnnnnnnnnnnnnnnnnnnnnnnnnnnnnnnnnnnnnnnnnnnnnnnnnnnnnnnnnnnnnnnnnnnnnnnnnnnnnnnnnnnnnnnnnnnnnnnnnnnnnnnnnnnnnnnnnnnnnnnnnnnnnnnnnnnnnnnnnnnnnnnnnnnnnnnnnnnnnnnnnnnnnnnnnnnnnnnnnnnnnnnnnnnnnnnnnnnnnnnnnnnnnnnnnnnnnnnnnnnnnnnnnnnnnnnnnnnnnnnnnnnnnnnnnnnnnnnnnnnnnnnnnnnnnnnnnnnnnnnnnnnnnnnnnnnnnnnnnnnnnnnnnnnnnnnnnnnnnnnnnnnnnnnnnnnnnnnnnnnnnnnnnnnnnnnnnnnnnnnnnnnnnnnnnnnnnnnnnnnnnnnnnnnnnnnnnnnnnnnnnnnnnnnnnnnnnnnnnnnnnnnnnnnnnnnnnnnnnnnnnnnnnnnnnnnnnnnnnnnnnnnnnnnnnnnnnnnnnnnnnnnnnnnnnnnnnnnnnnnnnnnnnnnnnnnnnnnnnnnnnnnnnnnnnnnnnnnnnnnnnnnnnnnnnnnnnnnnnnnnnnnnnnnnnnnnnnnnnnnnnnnnnnnnnnnnnnnnnnnnnnnnnnnnnnnnnnnnnnnnnnnnnnnnnnnnnnnnnnnnnnnnnnnnnnnnnnnnnnnnnnnnnnnnnnnnnnnnnnnnnnnnnnnnnnnnnnnnnnnnnnnnnnnnnnnnnnnnnnnnnnnnnnnnnnnnnnnnnnnnnnnnnnnnnnnnnnnnnnnnnnnnnnnnnnnnnnnnnnnnnnnnnnnnnnnnnnnnnnnnnnnnnnnnnnnnnnnnnnnnnnnnnnnnnnnnnnnnnnnnnnnnnnnnnnnnnnnnnnnnnnnnnnnnnnnnnnnnnnnnnnnnnnnnnnnnnnnnnnnnnnnnnnnnnnnnnnnnnnnnnnnnnnnnnnnnnnnnnnnnnnnnnnnnnnnnnnnnnnnnnnnnnnnnnnnnnnnnnnnnnnnnnnnnnnnnnnnnnnnnnnnnnnnnnnnnnnnnnnnnnnnnnnnnnnnnnnnnnnnnnnnnnnnnnnnnnnnnnnnnnnnnnnnnnnnnnnnnnnnnnnnnnnnnnnnnnnnnnnnnnnnnnnnnnnnnnnnnnnnnnnnnnnnnnnnnnnnnnnnnnnnnnnnnnnnnnnnnnnnnnnnnnnnnnnnnnnnnnnnnnnnnnnnnnnnnnnnnnnnnnnnnnnnnnnnnnnnnnnnnnnnnnnnnnnnnnnnnnnnnnnnnnnnnnnnnnnnnnnnnnnnnnnnnnnnnnnnnnnnnnnnnnnnnnnnnnnnnnnnnnnnnnnnnnnnnnnnnnnnnnnnnnnnnnnnnnnnnnnnnnnnnnnnnnnnnnnnnnnnnnnnnnnnnnnnnnnnnnnnnnnnnnnnnnnnnnnnnnnnnnnnnnnnnnnnnnnnnnnnnnnnnnnnnnnnnnnnnnnnnnnnnnnnnnnnnnnnnnnnnnnnnnnnnnnnnnnnnnnnnnnnnnnnnnnnnnnnnnnnnnnnnnnnnnnnnnnnnnnnnnnnnnnnnnnnnnnnnnnnnnnnnnnnnnnnnnnnnnnnnnnnnnnnnnnnnnnnnnnnnnnnnnnnnnnnnnnnnnnnnnnnnnnnnnnnnnnnnnnnnnnnnnnnnnnnnnnnnnnnnnnnnnnnnnnnnnnnnnnnnnnnnnnnnnnnnnnnnnnnnnnnnnnnnnnnnnnnnnnnnnnnnnnnnnnnnnnnnnnnnnnnnnnnnnnnnnnnnnnnnnnnnnnnnnnnnnnnnnnnnnnnnnnnnnnnnnnnnnnnnnnnnnnnnnnnnnnnnnnnnnnnnnnnnnnnnnnnnnnnnnnnnnnnnnnnnnnnnnnnnnnnnnnnnnnnnnnnnnnnnnnnnnnnnnnnnnnnnnnnnnnnnnnnnnnnnnnnnnnnnnnnnnnnnnnnnnnnnnnnnnnnnnnnnnnnnnnnnnnnnnnnnnnnnnnnnnnnnnnnnnnnnnnnnnnnnnnnnnnnnnnnnnnnnnnnnnnnnnnnnnnnnnnnnnnnnnnnnnnnnnnnnnnnnnnnnnnnnnnnnnnnnnnnnnnnnnnnnnnnnnnnnnnnnnnnnnnnnnnnnnnnnnnnnnnnnnnnnnnnnnnnnnnnnnnnnnnnnnnnnnnnnnnnnnnnnnnnnnnnnnnnnnnnnnnnnnnnnnnnnnnnnnnnnnnnnnnnnnnnnnnnnnnnnnnnnnnnnnnnnnnnnnnnnnnnnnnnnnnnnnnnnnnnnnnnnnnnnnnnnnnnnnnnnnnnnnnnnnnnnnnnnnnnnnnnnnnnnnnnnnnnnnnnnnnnnnnnnnnnnnnnnnnnnnnnnnnnnnnnnnnnnnnnnnnnnnnnnnnnnnnnnnnnnnnnnnnnnnnnnnnnnnnnnnnnnnnnnnnnnnnnnnnnnnnnnnnnnnnnnnnnnnnnnnnnnnnnnnnnnnnnnnnnnnnnnnnnnnnnnnnnnnnnnnnnnnnnnnnnnnnnnnnnnnnnnnnnnnnnnnnnnnnnnnnnnnnnnnnnnnnnnnnnnnnnnnnnnnnnnnnnnnnnnnnnnnnnnnnnnnnnnnnnnnnnnnnnnnnnnnnnnnnnnnnnnnnnnnnnnnnnnnnnnnnnnnnnnnnnnnnnnnnnnnnnnnnnnnnnnnnnnnnnnnnnnnnnnnnnnnnnnnnnnnnnnnnnnnnnnnnnnnnnnnnnnnnnnnnnnnnnnnnnnnnnnnnnnnnnnnnnnnnnnnnnnnnnnnnnnnnnnnnnnnnnnnnnnnnnnnnnnnnnnnnnnnnnnnnnnnnnnnnnnnnnnnnnnnnnnnnnnnnnnnnnnnnnnnnnnnnnnnnnnnnnnnnnnnnnnnnnnnnnnnnnnnnnnnnnnnnnnnnnnnnnnnnnnnnnnnnnnnnnnnnnnnnnnnnnnnnnnnnnnnnnnnnnnnnnnnnnnnnnnnnnnnnnnnnnnnnnnnnnnnnnnnnnnnnnnnnnnnnnnnnnnnnnnnnnnnnnnnnnnnnnnnnnnnnnnnnnnnnnnnnnnnnnnnnnnnnnnnnnnnnnnnnnnnnnnnnnnnnnnnnnnnnnnnnnnnnnnnnnnnnnnnnnnnnnnnnnnnnnnnnnnnnnnnnnnnnnnnnnnnnnnnnnnnnnnnnnnnnnnnnnnnnnnnnnnnnnnnnnnnnnnnnnnnnnnnnnnnnnnnnnnnnnnnnnnnnnnnnnnnnnnnnnnnnnnnnnnnnnnnnnnnnnnnnnnnnnnnnnnnnnnnnnnnnnnnnnnnnnnnnnnnnnnnnnnnnnnnnnnnnnnnnnnnnnnnnnnnnnnnnnnnnnnnnnnnnnnnnnnnnnnnnnnnnnnnnnnnnnnnnnnnnnnnnnnnnnnnnnnnnnnnnnnnnnnnnnnnnnnnnnnnnnnnnnnnnnnnnnnnnnnnnnnnnnnnnnnnnnnnnnnnnnnnnnnnnnnnnnnnnnnnnnnnnnnnnnnnnnnnnnnnnnnnnnnnnnnnnnnnnnnnnnnnnnnnnnnnnnnnnnnnnnnnnnnnnnnnnnnnnnnnnnnnnnnnnnnnnnnnnnnnnnnnnnnnnnnnnnnnnnnnnnnnnnnnnnnnnnnnnnnnnnnnnnnnnnnnnnnnnnnnnnnnnnnnnnnnnnnnnnnnnnnnnnnnnnnnnnnnnnnnnnnnnnnnnnnnnnnnnnnnnnnnnnnnnnnnnnnnnnnnnnnnnnnnnnnnnnnnnnnnnnnnnnnnnnnnnnnnnnnnnnnnnnnnnnnnnnnnnnnnnnnnnnnnnnnnnnnnnnnnnnnnnnnnnnnnnnnnnnnnnnnnnnnnnnnnnnnnnnnnnnnnnnnnnnnnnnnnnnnnnnnnnnnnnnnnnnnnnnnnnnnnnnnnnnnnnnnnnnnnnnnnnnnnnnnnnnnnnnnnnnnnnnnnnnnnnnnnnnnnnnnnnnnnnnnnnnnnnnnnnnnnnnnnnnnnnnnnnnnnnnnnnnnnnnnnnnnnnnnnnnnnnnnnnnnnnnnnnnnnnnnnnnnnnnnnnnnnnnnnnnnnnnnnnnnnnnnnnnnnnnnnnnnnnnnnnnnnnnnnnnnnnnnnnnnnnnnnnnnnnnnnnnnnnnnnnnnnnnnnnnnnnnnnnnnnnnnnnnnnnnnnnnnnnnnnnnnnnnnnnnnnnnnnnnnnnnnnnnnnnnnnnnnnnnnnnnnnnnnnnnnnnnnnnnnnnnnnnnnnnnnnnnnnnnnnnnnnnnnnnnnnnnnnnnnnnnnnnnnnnnnnnnnnnnnnnnnnnnnnnnnnnnnnnnnnnnnnnnnnnnnnnnnnnnnnnnnnnnnnnnnnnnnnnnnnnnnnnnnnnnnnnnnnnnnnnnnnnnnnnnnnnnnnnnnnnnnnnnnnnnnnnnnnnnnnnnnnnnnnnnnnnnnnnnnnnnnnnnnnnnnnnnnnnnnnnnnnnnnnnnnnnnnnnnnnnnnnnnnnnnnnnnnnnnnnnnnnnnnnnnnnnnnnnnnnnnnnnnnnnnnnnnnnnnnnnnnnnnnnnnnnnnnnnnnnnnnnnnnnnnnnnnnnnnnnnnnnnnnnnnnnnnnnnnnnnnnnnnnnnnnnnnnnnnnnnnnnnnnnnnnnnnnnnnnnnnnnnnnnnnnnnnnnnnnnnnnnnnnnnnnnnnnnnnnnnnnnnnnnnnnnnnnnnnnnnnnnnnnnnnnnnnnnnnnnnnnnnnnnnnnnnnnnnnnnnnnnnnnnnnnnnnnnnnnnnnnnnnnnnnnnnnnnnnnnnnnnnnnnnnnnnnnnnnnnnnnnnnnnnnnnnnnnnnnnnnnnnnnnnnnnnnnnnnnnnnnnnnnnnnnnnnnnnnnnnnnnnnnnnnnnnnnnnnnnnnnnnnnnnnnnnnnnnnnnnnnnnnnnnnnnnnnnnnnnnnnnnnnnnnnnnnnnnnnnnnnnnnnnnnnnnnnnnnnnnnnnnnnnnnnnnnnnnnnnnnnnnnnnnnnnnnnnnnnnnnnnnnnnnnnnnnnnnnnnnnnnnnnnnnnnnnnnnnnnnnnnnnnnnnnnnnnnnnnnnnnnnnnnnnnnnnnnnnnnnnnnnnnnnnnnnnnnnnnnnnnnnnnnnnnnnnnnnnnnnnnnnnnnnnnnnnnnnnnnnnnnnnnnnnnnnnnnnnnnnnnnnnnnnnnnnnnnnnnnnnnnnnnnnnnnnnnnnnnnnnnnnnnnnnnnnnnnnnnnnnnnnnnnnnnnnnnnnnnnnnnnnnnnnnnnnnnnnnnnnnnnnnnnnnnnnnnnnnnnnnnnnnnnnnnnnnnnnnnnnnnnnnnnnnnnnnnnnnnnnnnnnnnnnnnnnnnnnnnnnnnnnnnnnnnnnnnnnnnnnnnnnnnnnnnnnnnnnnnnnnnnnnnnnnnnnnnnnnnnnnnnnnnnnnnnnnnnnnnnnnnnnnnnnnnnnnnnnnnnnnnnnnnnnnnnnnnnnnnnnnnnnnnnnnnnnnnnnnnnnnnnnnnnnnnnnnnnnnnnnnnnnnnnnnnnnnnnnnnnnnnnnnnnnnnnnnnnnnnnnnnnnnnnnnnnnnnnnnnnnnnnnnnnnnnnnnnnnnnnnnnnnnnnnnnnnnnnnnnnnnnnnnnnnnnnnnnnnnnnnnnnnnnnnnnnnnnnnnnnnnnnnnnnnnnnnnnnnnnnnnnnnnnnnnnnnnnnnnnnnnnnnnnnnnnnnnnnnnnnnnnnnnnnnnnnnnnnnnnnnnnnnnnnnnnnnnnnnnnnnnnnnnnnnnnnnnnnnnnnnnnnnnnnnnnnnnnnnnnnnnnnnnnnnnnnnnnnnnnnnnnnnnnnnnnnnnnnnnnnnnnnnnnnnnnnnnnnnnnnnnnnnnnnnnnnnnnnnnnnnnnnnnnnnnnnnnnnnnnnnnnnnnnnnnnnnnnnnnnnnnnnnnnnnnnnnnnnnnnnnnnnnnnnnnnnnnnnnnnnnnnnnnnnnnnnnnnnnnnnnnnnnnnnnnnnnnnnnnnnnnnnnnnnnnnnnnnnnnnnnnnnnnnnnnnnnnnnnnnnnnnnnnnnnnnnnnnnnnnnnnnnnnnnnnnnnnnnnnnnnnnnnnnnnnnnnnnnnnnnnnnnnnnnnnnnnnnnnnnnnnnnnnnnnnnnnnnnnnnnnnnnnnnnnnnnnnnnnnnnnnnnnnnnnnnnnnnnnnnnnnnnnnnnnnnnnnnnnnnnnnnnnnnnnnnnnnnnnnnnnnnnnnnnnnnnnnnnnnnnnnnnnnnnnnnnnnnnnnnnnnnnnnnnnnnnnnnnnnnnnnnnnnnnnnnnnnnnnnnnnnnnnnnnnnnnnnnnnnnnnnnnnnnnnnnnnnnnnnnnnnnnnnnnnnnnnnnnnnnnnnnnnnnnnnnnnnnnnnnnnnnnnnnnnnnnnnnnnnnnnnnnnnnnnnnnnnnnnnnnnnnnnnnnnnnnnnnnnnnnnnnnnnnnnnnnnnnnnnnnnnnnnnnnnnnnnnnnnnnnnnnnnnnnnnnnnnnnnnnnnnnnnnnnnnnnnnnnnnnnnnnnnnnnnnnnnnnnnnnnnnnnnnnnnnnnnnnnnnnnnnnnnnnnnnnnnnnnnnnnnnnnnnnnnnnnnnnnnnnnnnnnnnnnnnnnnnnnnnnnnnnnnnnnnnnnnnnnnnnnnnnnnnnnnnnnnnnnnnnnnnnnnnnnnnnnnnnnnnnnnnnnnnnnnnnnnnnnnnnnnnnnnnnnnnnnnnnnnnnnnnnnnnnnnnnnnnnnnnnnnnnnnnnnnnnnnnnnnnnnnnnnnnnnnnnnnnnnnnnnnnnnnnnnnnnnnnnnnnnnnnnnnnnnnnnnnnnnnnnnnnnnnnnnnnnnnnnnnnnnnnnnnnnnnnnnnnnnnnnnnnnnnnnnnnnnnnnnnnnnnnnnnnnnnnnnnnnnnnnnnnnnnnnnnnnnnnnnnnnnnnnnnnnnnnnnnnnnnnnnnnnnnnnnnnnnnnnnnnnnnnnnnnnnnnnnnnnnnnnnnnnnnnnnnnnnnnnnnnnnnnnnnnnnnnnnnnnnnnnnnnnnnnnnnnnnnnnnnnnnnnnnnnnnnnnnnnnnnnnnnnnnnnnnnnnnnnnnnnnnnnnnnnnnnnnnnnnnnnnnnnnnnnnnnnnnnnnnnnnnnnnnnnnnnnnnnnnnnnnnnnnnnnnnnnnnnnnnnnnnnnnnnnnnnnnnnnnnnnnnnnnnnnnnnnnnnnnnnnnnnnnnnnnnnnnnnnnnnnnnnnnnnnnnnnnnnnnnnnnnnnnnnnnnnnnnnnnnnnnnnnnnnnnnnnnnnnnnnnnnnnnnnnnnnnnnnnnnnnnnnnnnnnnnnnnnnnnnnnnnnnnnnnnnnnnnnnnnnnnnnnnnnnnnnnnnnnnnnnnnnnnnnnnnnnnnnnnnnnnnnnnnnnnnnnnnnnnnnnnnnnnnnnnnnnnnnnnnnnnnnnnnnnnnnnnnnnnnnnnnnnnnnnnnnnnnnnnnnnnnnnnnnnnnnnnnnnnnnnnnnnnnnnnnnnnnnnnnnnnnnnnnnnnnnnnnnnnnnnnnnnnnnnnnnnnnnnnnnnnnnnnnnnnnnnnnnnnnnnnnnnnnnnnnnnnnnnnnnnnnnnnnnnnnnnnnnnnnnnnnnnnnnnnnnnnnnnnnnnnnnnnnnnnnnnnnnnnnnnnnnnnnnnnnnnnnnnnnnnnnnnnnnnnnnnnnnnnnnnnnnnnnnnnnnnnnnnnnnnnnnnnnnnnnnnnnnnnnnnnnnnnnnnnnnnnnnnnnnnnnnnnnnnnnnnnnnnnnnnnnnnnnnnnnnnnnnnnnnnnnnnnnnnnnnnnnnnnnnnnnnnnnnnnnnnnnnnnnnnnnnnnnnnnnnnnnnnnnnnnnnnnnnnnnnnnnnnnnnnnnnnnnnnnnnnnnnnnnnnnnnnnnnnnnnnnnnnnnnnnnnnnnnnnnnnnnnnnnnnnnnnnnnnnnnnnnnnnnnnnnnnnnnnnnnnnnnnnnnnnnnnnnnnnnnnnnnnnnnnnnnnnnnnnnnnnnnnnnnnnnnnnnnnnnnnnnnnnnnnnnnnnnnnnnnnnnnnnnnnnnnnnnnnnnnnnnnnnnnnnnnnnnnnnnnnnnnnnnnnnnnnnnnnnnnnnnnnnnnnnnnnnnnnnnnnnnnnnnnnnnnnnnnnnnnnnnnnnnnnnnnnnnnnnnnnnnnnnnnnnnnnnnnnnnnnnnnnnnnnnnnnnnnnnnnnnnnnnnnnnnnnnnnnnnnnnnnnnnnnnnnnnnnnnnnnnnnnnnnnnnnnnnnnnnnnnnnnnnnnnnnnnnnnnnnnnnnnnnnnnnnnnnnnnnnnnnnnnnnnnnnnnnnnnnnnnnnnnnnnnnnnnnnnnnnnnnnnnnnnnnnnnnnnnnnnnnnnnnnnnnnnnnnnnnnnnnnnnnnnnnnnnnnnnnnnnnnnnnnnnnnnnnnnnnnnnnnnnnnnnnnnnnnnnnnnnnnnnnnnnnnnnnnnnnnnnnnnnnnnnnnnnnnnnnnnnnnnnnnnnnnnnnnnnnnnnnnnnnnnnnnnnnnnnnnnnnnnnnnnnnnnnnnnnnnnnnnnnnnnnnnnnnnnnnnnnnnnnnnnnnnnnnnnnnnnnnnnnnnnnnnnnnnnnnnnnnnnnnnnnnnnnnnnnnnnnnnnnnnnnnnnnnnnnnnnnnnnnnnnnnnnnnnnnnnnnnnnnnnnnnnnnnnnnnnnnnnnnnnnnnnnnnnnnnnnnnnnnnnnnnnnnnnnnnnnnnnnnnnnnnnnnnnnnnnnnnnnnnnnnnnnnnnnnnnnnnnnnnnnnnnnnnnnnnnnnnnnnnnnnnnnnnnnnnnnnnnnnnnnnnnnnnnnnnnnnnnnnnnnnnnnnnnnnnnnnnnnnnnnnnnnnnnnnnnnnnnnnnnnnnnnnnnnnnnnnnnnnnnnnnnnnnnnnnnnnnnnnnnnnnnnnnnnnnnnnnnnnnnnnnnnnnnnnnnnnnnnnnnnnnnnnnnnnnnnnnnnnnnnnnnnnnnnnnnnnnnnnnnnnnnnnnnnnnnnnnnnnnnnnnnnnnnnnnnnnnnnnnnnnnnnnnnnnnnnnnnnnnnnnnnnnnnnnnnnnnnnnnnnnnnnnnnnnnnnnnnnnnnnnnnnnnnnnnnnnnnnnnnnnnnnnnnnnnnnnnnnnnnnnnnnnnnnnnnnnnnnnnnnnnnnnnnnnnnnnnnnnnnnnnnnnnnnnnnnnnnnnnnnnnnnnnnnnnnnnnnnnnnnnnnnnnnnnnnnnnnnnnnnnnnnnnnnnnnnnnnnnnnnnnnnnnnnnnnnnnnnnnnnnnnnnnnnnnnnnnnnnnnnnnnnnnnnnnnnnnnnnnnnnnnnnnnnnnnnnnnnnnnnnnnnnnnnnnnnnnnnnnnnnnnnnnnnnnnnnnnnnnnnnnnnnnnnnnnnnnnnnnnnnnnnnnnnnnnnnnnnnnnnnnnnnnnnnnnnnnnnnnnnnnnnnnnnnnnnnnnnnnnnnnnnnnnnnnnnnnnnnnnnnnnnnnnnnnnnnnnnnnnnnnnnnnnnnnnnnnnnnnnnnnnnnnnnnnnnnnnnnnnnnnnnnnnnnnnnnnnnnnnnnnnnnnnnnnnnnnnnnnnnnnnnnnnnnnnnnnnnnnnnnnnnnnnnnnnnnnnnnnnnnnnnnnnnnnnnnnnnnnnnnnnnnnnnnnnnnnnnnnnnnnnnnnnnnnnnnnnnnnnnnnnnnnnnnnnnnnnnnnnnnnnnnnnnnnnnnnnnnnnnnnnnnnnnnnnnnnnnnnnnnnnnnnnnnnnnnnnnnnnnnnnnnnnnnnnnnnnnnnnnnnnnnnnnnnnnnnnnnnnnnnnnnnnnnnnnnnnnnnnnnnnnnnnnnnnnnnnnnnnnnnnnnnnnnnnnnnnnnnnnnnnnnnnnnnnnnnnnnnnnnnnnnnnnnnnnnnnnnnnnnnnnnnnnnnnnnnnnnnnnnnnnnnnnnnnnnnnnnnnnnnnnnnnnnnnnnnnnnnnnnnnnnnnnnnnnnnnnnnnnnnnnnnnnnnnnnnnnnnnnnnnnnnnnnnnnnnnnnnnnnnnnnnnnnnnnnnnnnnnnnnnnnnnnnnnnnnnnnnnnnnnnnnnnnnnnnnnnnnnnnnnnnnnnnnnnnnnnnnnnnnnnnnnnnnnnnnnnnnnnnnnnnnnnnnnnnnnnnnnnnnnnnnnnnnnnnnnnnnnnnnnnnnnnnnnnnnnnnnnnnnnnnnnnnnnnnnnnnnnnnnnnnnnnnnnnnnnnnnnnnnnnnnnnnnnnnnnnnnnnnnnnnnnnnnnnnnnnnnnnnnnnnnnnnnnnnnnnnnnnnnnnnnnnnnnnnnnnnnnnnnnnnnnnnnnnnnnnnnnnnnnnnnnnnnnnnnnnnnnnnnnnnnnnnnnnnnnnnnnnnnnnnnnnnnnnnnnnnnnnnnnnnnnnnnnnnnnnnnnnnnnnnnnnnnnnnnnnnnnnnnnnnnnnnnnnnnnnnnnnnnnnnnnnnnnnnnnnnnnnnnnnnnnnnnnnnnnnnnnnnnnnnnnnnnnnnnnnnnnnnnnnnnnnnnnnnnnnnnnnnnnnnnnnnnnnnnnnnnnnnnnnnnnnnnnnnnnnnnnnnnnnnnnnnnnnnnnnnnnnnnnnnnnnnnnnnnnnnnnnnnnnnnnnnnnnnnnnnnnnnnnnnnnnnnnnnnnnnnnnnnnnnnnnnnnnnnnnnnnnnnnnnnnnnnnnnnnnnnnnnnnnnnnnnnnnnnnnnnnnnnnnnnnnnnnnnnnnnnnnnnnnnnnnnnnnnnnnnnnnnnnnnnnnnnnnnnnnnnnnnnnnnnnnnnnnnnnnnnnnnnnnnnnnnnnnnnnnnnnnnnnnnnnnnnnnnnnnnnnnnnnnnnnnnnnnnnnnnnnnnnnnnnnnnnnnnnnnnnnnnnnnnnnnnnnnnnnnnnnnnnnnnnnnnnnnnnnnnnnnnnnnnnnnnnnnnnnnnnnnnnnnnnnnnnnnnnnnnnnnnnnnnnnnnnnnnnnnnnnnnnnnnnnnnnnnnnnnnnnnnnnnnnnnnnnnnnnnnnnnnnnnnnnnnnnnnnnnnnnnnnnnnnnnnnnnnnnnnnnnnnnnnnnnnnnnnnnnnnnnnnnnnnnnnnnnnnnnnnnnnnnnnnnnnnnnnnnnnnnnnnnnnnnnnnnnnnnnnnnnnnnnnnnnnnnnnnnnnnnnnnnnnnnnnnnnnnnnnnnnnnnnnnnnnnnnnnnnnnnnnnnnnnnnnnnnnnnnnnnnnnnnnnnnnnnnnnnnnnnnnnnnnnnnnnnnnnnnnnnnnnnnnnnnnnnnnnnnnnnnnnnnnnnnnnnnnnnnnnnnnnnnnnnnnnnnnnnnnnnnnnnnnnnnnnnnnnnnnnnnnnnnnnnnnnnnnnnnnnnnnnnnnnnnnnnnnnnnnnnnnnnnnnnnnnnnnnnnnnnnnnnnnnnnnnnnnnnnnnnnnnnnnnnnnnnnnnnnnnnnnnnnnnnnnnnnnnnnnnnnnnnnnnnnnnnnnnnnnnnnnnnnnnnnnnnnnnnnnnnnnnnnnnnnnnnnnnnnnnnnnnnnnnnnnnnnnnnnnnnnnnnnnnnnnnnnnnnnnnnnnnnnnnnnnnnnnnnnnnnnnnnnnnnnnnnnnnnnnnnnnnnnnnnnnnnnnnnnnnnnnnnnnnnnnnnnnnnnnnnnnnnnnnnnnnnnnnnnnnnnnnnnnnnnnnnnnnnnnnnnnnnnnnnnnnnnnnnnnnnnnnnnnnnnnnnnnnnnnnnnnnnnnnnnnnnnnnnnnnnnnnnnnnnnnnnnnnnnnnnnnnnnnnnnnnnnnnnnnnnnnnnnnnnnnnnnnnnnnnnnnnnnnnnnnnnnnnnnnnnnnnnnnnnnnnnnnnnnnnnnnnnnnnnnnnnnnnnnnnnnnnnnnnnnnnnnnnnnnnnnnnnnnnnnnnnnnnnnnnnnnnnnnnnnnnnnnnnnnnnnnnnnnnnnnnnnnnnnnnnnnnnnnnnnnnnnnnnnnnnnnnnnnnnnnnnnnnnnnnnnnnnnnnnnnnnnnnnnnnnnnnnnnnnnnnnnnnnnnnnnnnnnnnnnnnnnnnnnnnnnnnnnnnnnnnnnnnnnnnnnnnnnnnnnnnnnnnnnnnnnnnnnnnnnnnnnnnnnnnnnnnnnnnnnnnnnnnnnnnnnnnnnnnnnnnnnnnnnnnnnnnnnnnnnnnnnnnnnnnnnnnnnnnnnnnnnnnnnnnnnnnnnnnnnnnnnnnnnnnnnnnnnnnnnnnnnnnnnnnnnnnnnnnnnnnnnnnnnnnnnnnnnnnnnnnnnnnnnnnnnnnnnnnnnnnnnnnnnnnnnnnnnnnnnnnnnnnnnnnnnnnnnnnnnnnnnnnnnnnnnnnnnnnnnnnnnnnnnnnnnnnnnnnnnnnnnnnnnnnnnnnnnnnnnnnnnnnnnnnnnnnnnnnnnnnnnnnnnnnnnnnnnnnnnnnnnnnnnnnnnnnnnnnnnnnnnnnnnnnnnnnnnnnnnnnnnnnnnnnnnnnnnnnnnnnnnnnnnnnnnnnnnnnnnnnnnnnnnnnnnnnnnnnnnnnnnnnnnnnnnnnnnnnnnnnnnnnnnnnnnnnnnnnnnnnnnnnnnnnnnnnnnnnnnnnnnnnnnnnnnnnnnnnnnnnnnnnnnnnnnnnnnnnnnnnnnnnnnnnnnnnnnnnnnnnnnnnnnnnnnnnnnnnnnnnnnnnnnnnnnnnnnnnnnnnnnnnnnnnnnnnnnnnnnnnnnnnnnnnnnnnnnnnnnnnnnnnnnnnnnnnnnnnnnnnnnnnnnnnnnnnnnnnnnnnnnnnnnnnnnnnnnnnnnnnnnnnnnnnnnnnnnnnnnnnnnnnnnnnnnnnnnnnnnnnnnnnnnnnnnnnnnnnnnnnnnnnnnnnnnnnnnnnnnnnnnnnnnnnnnnnnnnnnnnnnnnnnnnnnnnnnnnnnnnnnnnnnnnnnnnnnnnnnnnnnnnnnnnnnnnnnnnnnnnnnnnnnnnnnnnnnnnnnnnnnnnnnnnnnnnnnnnnnnnnnnnnnnnnnnnnnnnnnnnnnnnnnnnnnnnnnnnnnnnnnnnnnnnnnnnnnnnnnnnnnnnnnnnnnnnnnnnnnnnnnnnnnnnnnnnnnnnnnnnnnnnnnnnnnnnnnnnnnnnnnnnnnnnnnnnnnnnnnnnnnnnnnnnnnnnnnnnnnnnnnnnnnnnnnnnnnnnnnnnnnnnnnnnnnnnnnnnnnnnnnnnnnnnnnnnnnnnnnnnnnnnnnnnnnnnnnnnnnnnnnnnnnnnnnnnnnnnnnnnnnnnnnnnnnnnnnnnnnnnnnnnnnnnnnnnnnnnnnnnnnnnnnnnnnnnnnnnnnnnnnnnnnnnnnnnnnnnnnnnnnnnnnnnnnnnnnnnnnnnnnnnnnnnnnnnnnnnnnnnnnnnnnnnnnnnnnnnnnnnnnnnnnnnnnnnnnnnnnnnnnnnnnnnnnnnnnnnnnnnnnnnnnnnnnnnnnnnnnnnnnnnnnnnnnnnnnnnnnnnnnnnnnnnnnnnnnnnnnnnnnnnnnnnnnnnnnnnnnnnnnnnnnnnnnnnnnnnnnnnnnnnnnnnnnnnnnnnnnnnnnnnnnnnnnnnnnnnnnnnnnnnnnnnnnnnnnnnnnnnnnnnnnnnnnnnnnnnnnnnnnnnnnnnnnnnnnnnnnnnnnnnnnnnnnnnnnnnnnnnnnnnnnnnnnnnnnnnnnnnnnnnnnnnnnnnnnnnnnnnnnnnnnnnnnnnnnnnnnnnnnnnnnnnnnnnnnnnnnnnnnnnnnnnnnnnnnnnnnnnnnnnnnnnnnnnnnnnnnnnnnnnnnnnnnnnnnnnnnnnnnnnnnnnnnnnnnnnnnnnnnnnnnnnnnnnnnnnnnnnnnnnnnnnnnnnnnnnnnnnnnnnnnnnnnnnnnnnnnnnnnnnnnnnnnnnnnnnnnnnnnnnnnnnnnnnnnnnnnnnnnnnnnnnnnnnnnnnnnnnnnnnnnnnnnnnnnnnnnnnnnnnnnnnnnnnnnnnnnnnnnnnnnnnnnnnnnnnnnnnnnnnnnnnnnnnnnnnnnnnnnnnnnnnnnnnnnnnnnnnnnnnnnnnnnnnnnnnnnnnnnnnnnnnnnnnnnnnnnnnnnnnnnnnnnnnnnnnnnnnnnnnnnnnnnnnnnnnnnnnnnnnnnnnnnnnnnnnnnnnnnnnnnnnnnnnnnnnnnnnnnnnnnnnnnnnnnnnnnnnnnnnnnnnnnnnnnnnnnnnnnnnnnnnnnnnnnnnnnnnnnnnnnnnnnnnnnnnnnnnnnnnnnnnnnnnnnnnnnnnnnnnnnnnnnnnnnnnnnnnnnnnnnnnnnnnnnnnnnnnnnnnnnnnnnnnnnnnnnnnnnnnnnnnnnnnnnnnnnnnnnnnnnnnnnnnnnnnnnnnnnnnnnnnnnnnnnnnnnnnnnnnnnnnnnnnnnnnnnnnnnnnnnnnnnnnnnnnnnnnnnnnnnnnnnnnnnnnnnnnnnnnnnnnnnnnnnnnnnnnnnnnnnnnnnnnnnnnnnnnnnnnnnnnnnnnnnnnnnnnnnnnnnnnnnnnnnnnnnnnnnnnnnnnnnnnnnnnnnnnnnnnnnnnnnnnnnnnnnnnnnnnnnnnnnnnnnnnnnnnnnnnnnnnnnnnnnnnnnnnnnnnnnnnnnnnnnnnnnnnnnnnnnnnnnnnnnnnnnnnnnnnnnnnnnnnnnnnnnnnnnnnnnnnnnnnnnnnnnnnnnnnnnnnnnnnnnnnnnnnnnnnnnnnnnnnnnnnnnnnnnnnnnnnnnnnnnnnnnnnnnnnnnnnnnnnnnnnnnnnnnnnnnnnnnnnnnnnnnnnnnnnnnnnnnnnnnnnnnnnnnnnnnnnnnnnnnnnnnnnnnnnnnnnnnnnnnnnnnnnnnnnnnnnnnnnnnnnnnnnnnnnnnnnnnnnnnnnnnnnnnnnnnnnnnnnnnnnnnnnnnnnnnnnnnnnnnnnnnnnnnnnnnnnnnnnnnnnnnnnnnnnnnnnnnnnnnnnnnnnnnnnnnnnnnnnnnnnnnnnnnnnnnnnnnnnnnnnnnnnnnnnnnnnnnnnnnnnnnnnnnnnnnnnnnnnnnnnnnnnnnnnnnnnnnnnnnnnnnnnnnnnnnnnnnnnnnnnnnnnnnnnnnnnnnnnnnnnnnnnnnnnnnnnnnnnnnnnnnnnnnnnnnnnnnnnnnnnnnnnnnnnnnnnnnnnnnnnnnnnnnnnnnnnnnnnnnnnnnnnnnnnnnnnnnnnnnnnnnnnnnnnnnnnnnnnnnnnnnnnnnnnnnnnnnnnnnnnnnnnnnnnnnnnnnnnnnnnnnnnnnnnnnnnnnnnnnnnnnnnnnnnnnnnnnnnnnnnnnnnnnnnnnnnnnnnnnnnnnnnnnnnnnnnnnnnnnnnnnnnnnnnnnnnnnnnnnnnnnnnnnnnnnnnnnnnnnnnnnnnnnnnnnnnnnnnnnnnnnnnnnnnnnnnnnnnnnnnnnnnnnnnnnnnnnnnnnnnnnnnnnnnnnnnnnnnnnnnnnnnnnnnnnnnnnnnnnnnnnnnnnnnnnnnnnnnnnnnnnnnnnnnnnnnnnnnnnnnnnnnnnnnnnnnnnnnnnnnnnnnnnnnnnnnnnnnnnnnnnnnnnnnnnnnnnnnnnnnnnnnnnnnnnnnnnnnnnnnnnnnnnnnnnnnnnnnnnnnnnnnnnnnnnnnnnnnnnnnnnnnnnnnnnnnnnnnnnnnnnnnnnnnnnnnnnnnnnnnnnnnnnnnnnnnnnnnnnnnnnnnnnnnnnnnnnnnnnnnnnnnnnnnnnnnnnnnnnnnnnnnnnnnnnnnnnnnnnnnnnnnnnnnnnnnnnnnnnnnnnnnnnnnnnnnnnnnnnnnnnnnnnnnnnnnnnnnnnnnnnnnnnnnnnnnnnnnnnnnnnnnnnnnnnnnnnnnnnnnnnnnnnnnnnnnnnnnnnnnnnnnnnnnnnnnnnnnnnnnnnnnnnnnnnnnnnnnnnnnnnnnnnnnnnnnnnnnnnnnnnnnnnnnnnnnnnnnnnnnnnnnnnnnnnnnnnnnnnnnnnnnnnnnnnnnnnnnnnnnnnnnnnnnnnnnnnnnnnnnnnnnnnnnnnnnnnnnnnnnnnnnnnnnnnnnnnnnnnnnnnnnnnnnnnnnnnnnnnnnnnnnnnnnnnnnnnnnnnnnnnnnnnnnnnnnnnnnnnnnnnnnnnnnnnnnnnnnnnnnnnnnnnnnnnnnnnnnnnnnnnnnnnnnnnnnnnnnnnnnnnnnnnnnnnnnnnnnnnnnnnnnnnnnnnnnnnnnnnnnnnnnnnnnnnnnnnnnnnnnnnnnnnnnnnnnnnnnnnnnnnnnnnnnnnnnnnnnnnnnnnnnnnnnnnnnnnnnnnnnnnnnnnnnnnnnnnnnnnnnnnnnnnnnnnnnnnnnnnnnnnnnnnnnnnnnnnnnnnnnnnnnnnnnnnnnnnnnnnnnnnnnnnnnnnnnnnnnnnnnnnnnnnnnnnnnnnnnnnnnnnnnnnnnnnnnnnnnnnnnnnnnnnnnnnnnnnnnnnnnnnnnnnnnnnnnnnnnnnnnnnnnnnnnnnnnnnnnnnnnnnnnnnnnnnnnnnnnnnnnnnnnnnnnnnnnnnnnnnnnnnnnnnnnnnnnnnnnnnnnnnnnnnnnnnnnnnnnnnnnnnnnnnnnnnnnnnnnnnnnnnnnnnnnnnnnnnnnnnnnnnnnnnnnnnnnnnnnnnnnnnnnnnnnnnnnnnnnnnnnnnnnnnnnnnnnnnnnnnnnnnnnnnnnnnnnnnnnnnnnnnnnnnnnnnnnnnnnnnnnnnnnnnnnnnnnnnnnnnnnnnnnnnnnnnnnnnnnnnnnnnnnnnnnnnnnnnnnnnnnnnnnnnnnnnnnnnnnnnnnnnnnnnnnnnnnnnnnnnnnnnnnnnnnnnnnnnnnnnnnnnnnnnnnnnnnnnnnnnnnnnnnnnnnnnnnnnnnnnnnnnnnnnnnnnnnnnnnnnnnnnnnnnnnnnnnnnnnnnnnnnnnnnnnnnnnnnnnnnnnnnnnnnnnnnnnnnnnnnnnnnnnnnnnnnnnnnnnnnnnnnnnnnnnnnnnnnnnnnnnnnnnnnnnnnnnnnnnnnnnnnnnnnnnnnnnnnnnnnnnnnnnnnnnnnnnnnnnnnnnnnnnnnnnnnnnnnnnnnnnnnnnnnnnnnnnnnnnnnnnnnnnnnnnnnnnnnnnnnnnnnnnnnnnnnnnnnnnnnnnnnnnnnnnnnnnnnnnnnnnnnnnnnnnnnnnnnnnnnnnnnnnnnnnnnnnnnnnnnnnnnnnnnnnnnnnnnnnnnnnnnnnnnnnnnnnnnnnnnnnnnnnnnnnnnnnnnnnnnnnnnnnnnnnnnnnnnnnnnnnnnnnnnnnnnnnnnnnnnnnnnnnnnnnnnnnnnnnnnnnnnnnnnnnnnnnnnnnnnnnnnnnnnnnnnnnnnnnnnnnnnnnnnnnnnnnnnnnnnnnnnnnnnnnnnnnnnnnnnnnnnnnnnnnnnnnnnnnnnnnnnnnnnnnnnnnnnnnnnnnnnnnnnnnnnnnnnnnnnnnnnnnnnnnnnnnnnnnnnnnnnnnnnnnnnnnnnnnnnnnnnnnnnnnnnnnnnnnnnnnnnnnnnnnnnnnnnnnnnnnnnnnnnnnnnnnnnnnnnnnnnnnnnnnnnnnnnnnnnnnnnnnnnnnnnnnnnnnnnnnnnnnnnnnnnnnnnnnnnnnnnnnnnnnnnnnnnnnnnnnnnnnnnnnnnnnnnnnnnnnnnnnnnnnnnnnnnnnnnnnnnnnnnnnnnnnnnnnnnnnnnnnnnnnnnnnnnnnnnnnnnnnnnnnnnnnnnnnnnnnnnnnnnnnnnnnnnnnnnnnnnnnnnnnnnnnnnnnnnnnnnnnnnnnnnnnnnnnnnnnnnnnnnnnnnnnnnnnnnnnnnnnnnnnnnnnnnnnnnnnnnnnnnnnnnnnnnnnnnnnnnnnnnnnnnnnnnnnnnnnnnnnnnnnnnnnnnnnnnnnnnnnnnnnnnnnnnnnnnnnnnnnnnnnnnnnnnnnnnnnnnnnnnnnnnnnnnnnnnnnnnnnnnnnnnnnnnnnnnnnnnnnnnnnnnnnnnnnnnnnnnnnnnnnnnnnnnnnnnnnnnnnnnnnnnnnnnnnnnnnnnnnnnnnnnnnnnnnnnnnnnnnnnnnnnnnnnnnnnnnnnnnnnnnnnnnnnnnnnnnnnnnnnnnnnnnnnnnnnnnnnnnnnnnnnnnnnnnnnnnnnnnnnnnnnnnnnnnnnnnnnnnnnnnnnnnnnnnnnnnnnnnnnnnnnnnnnnnnnnnnnnnnnnnnnnnnnnnnnnnnnnnnnnnnnnnnnnnnnnnnnnnnnnnnnnnnnnnnnnnnnnnnnnnnnnnnnnnnnnnnnnnnnnnnnnnnnnnnnnnnnnnnnnnnnnnnnnnnnnnnnnnnnnnnnnnnnnnnnnnnnnnnnnnnnnnnnnnnnnnnnnnnnnnnnnnnnnnnnnnnnnnnnnnnnnnnnnnnnnnnnnnnnnnnnnnnnnnnnnnnnnnnnnnnnnnnnnnnnnnnnnnnnnnnnnnnnnnnnnnnnnnnnnnnnnnnnnnnnnnnnnnnnnnnnnnnnnnnnnnnnnnnnnnnnnnnnnnnnnnnnnnnnnnnnnnnnnnnnnnnnnnnnnnnnnnnnnnnnnnnnnnnnnnnnnnnnnnnnnnnnnnnnnnnnnnnnnnnnnnnnnnnnnnnnnnnnnnnnnnnnnnnnnnnnnnnnnnnnnnnnnnnnnnnnnnnnnnnnnnnnnnnnnnnnnnnnnnnnnnnnnnnnnnnnnnnnnnnnnnnnnnnnnnnnnnnnnnnnnnnnnnnnnnnnnnnnnnnnnnnnnnnnnnnnnnnnnnnnnnnnnnnnnnnnnnnnnnnnnnnnnnnnnnnnnnnnnnnnnnnnnnnnnnnnnnnnnnnnnnnnnnnnnnnnnnnnnnnnnnnnnnnnnnnnnnnnnnnnnnnnnnnnnnnnnnnnnnnnnnnnnnnnnnnnnnnnnnnnnnnnnnnnnnnnnnnnnnnnnnnnnnnnnnnnnnnnnnnnnnnnnnnnnnnnnnnnnnnnnnnnnnnnnnnnnnnnnnnnnnnnnnnnnnnnnnnnnnnnnnnnnnnnnnnnnnnnnnnnnnnnnnnnnnnnnnnnnnnnnnnnnnnnnnnnnnnnnnnnnnnnnnnnnnnnnnnnnnnnnnnnnnnnnnnnnnnnnnnnnnnnnnnnnnnnnnnnnnnnnnnnnnnnnnnnnnnnnnnnnnnnnnnnnnnnnnnnnnnnnnnnnnnnnnnnnnnnnnnnnnnnnnnnnnnnnnnnnnnnnnnnnnnnnnnnnnnnnnnnnnnnnnnnnnnnnnnnnnnnnnnnnnnnnnnnnnnnnnnnnnnnnnnnnnnnnnnnnnnnnnnnnnnnnnnnnnnnnnnnnnnnnnnnnnnnnnnnnnnnnnnnnnnnnnnnnnnnnnnnnnnnnnnnnnnnnnnnnnnnnnnnnnnnnnnnnnnnnnnnnnnnnnnnnnnnnnnnnnnnnnnnnnnnnnnnnnnnnnnnnnnnnnnnnnnnnnnnnnnnnnnnnnnnnnnnnnnnnnnnnnnnnnnnnnnnnnnnnnnnnnnnnnnnnnnnnnnnnnnnnnnnnnnnnnnnnnnnnnnnnnnnnnnnnnnnnnnnnnnnnnnnnnnnnnnnnnnnnnnnnnnnnnnnnnnnnnnnnnnnnnnnnnnnnnnnnnnnnnnnnnnnnnnnnnnnnnnnnnnnnnnnnnnnnnnnnnnnnnnnnnnnnnnnnnnnnnnnnnnnnnnnnnnnnnnnnnnnnnnnnnnnnnnnnnnnnnnnnnnnnnnnnnnnnnnnnnnnnnnnnnnnnnnnnnnnnnnnnnnnnnnnnnnnnnnnnnnnnnnnnnnnnnnnnnnnnnnnnnnnnnnnnnnnnnnnnnnnnnnnnnnnnnnnnnnnnnnnnnnnnnnnnnnnnnnnnnnnnnnnnnnnnnnnnnnnnnnnnnnnnnnnnnnnnnnnnnnnnnnnnnnnnnnnnnnnnnnnnnnnnnnnnnnnnnnnnnnnnnnnnnnnnnnnnnnnnnnnnnnnnnnnnnnnnnnnnnnnnnnnnnnnnnnnnnnnnnnnnnnnnnnnnnnnnnnnnnnnnnnnnnnnnnnnnnnnnnnnnnnnnnnnnnnnnnnnnnnnnnnnnnnnnnnnnnnnnnnnnnnnnnnnnnnnnnnnnnnnnnnnnnnnnnnnnnnnnnnnnnnnnnnnnnnnnnnnnnnnnnnnnnnnnnnnnnnnnnnnnnnnnnnnnnnnnnnnnnnnnnnnnnnnnnnnnnnnnnnnnnnnnnnnnnnnnnnnnnnnnnnnnnnnnnnnnnnnnnnnnnnnnnnnnnnnnnnnnnnnnnnnnnnnnnnnnnnnnnnnnnnnnnnnnnnnnnnnnnnnnnnnnnnnnnnnnnnnnnnnnnnnnnnnnnnnnnnnnnnnnnnnnnnnnnnnnnnnnnnnnnnnnnnnnnnnnnnnnnnnnnnnnnnnnnnnnnnnnnnnnnnnnnnnnnnnnnnnnnnnnnnnnnnnnnnnnnnnnnnnnnnnnnnnnnnnnnnnnnnnnnnnnnnnnnnnnnnnnnnnnnnnnnnnnnnnnnnnnnnnnnnnnnnnnnnnnnnnnnnnnnnnnnnnnnnnnnnnnnnnnnnnnnnnnnnnnnnnnnnnnnnnnnnnnnnnnnnnnnnnnnnnnnnnnnnnnnnnnnnnnnnnnnnnnnnnnnnnnnnnnnnnnnnnnnnnnnnnnnnnnnnnnnnnnnnnnnnnnnnnnnnnnnnnnnnnnnnnnnnnnnnnnnnnnnnnnnnnnnnnnnnnnnnnnnnnnnnnnnnnnnnnnnnnnnnnnnnnnnnnnnnnnnnnnnnnnnnnnnnnnnnnnnnnnnnnnnnnnnnnnnnnnnnnnnnnnnnnnnnnnnnnnnnnnnnnnnnnnnnnnnnnnnnnnnnnnnnnnnnnnnnnnnnnnnnnnnnnnnnnnnnnnnnnnnnnnnnnnnnnnnnnnnnnnnnnnnnnnnnnnnnnnnnnnnnnnnnnnnnnnnnnnnnnnnnnnnnnnnnnnnnnnnnnnnnnnnnnnnnnnnnnnnnnnnnnnnnnnnnnnnnnnnnnnnnnnnnnnnnnnnnnnnnnnnnnnnnnnnnnnnnnnnnnnnnnnnnnnnnnnnnnnnnnnnnnnnnnnnnnnnnnnnnnnnnnnnnnnnnnnnnnnnnnnnnnnnnnnnnnnnnnnnnnnnnnnnnnnnnnnnnnnnnnnnnnnnnnnnnnnnnnnnnnnnnnnnnnnnnnnnnnnnnnnnnnnnnnnnnnnnnnnnnnnnnnnnnnnnnnnnnnnnnnnnnnnnnnnnnnnnnnnnnnnnnnnnnnnnnnnnnnnnnnnnnnnnnnnnnnnnnnnnnnnnnnnnnnnnnnnnnnnnnnnnnnnnnnnnnnnnnnnnnnnnnnnnnnnnnnnnnnnnnnnnnnnnnnnnnnnnnnnnnnnnnnnnnnnnnnnnnnnnnnnnnnnnnnnnnnnnnnnnnnnnnnnnnnnnnnnnnnnnnnnnnnnnnnnnnnnnnnnnnnnnnnnnnnnnnnnnnnnnnnnnnnnnnnnnnnnnnnnnnnnnnnnnnnnnnnnnnnnnnnnnnnnnnnnnnnnnnnnnnnnnnnnnnnnnnnnnnnnnnnnnnnnnnnnnnnnnnnnnnnnnnnnnnnnnnnnnnnnnnnnnnnnnnnnnnnnnnnnnnnnnnnnnnnnnnnnnnnnnnnnnnnnnnnnnnnnnnnnnnnnnnnnnnnnnnnnnnnnnnnnnnnnnnnnnnnnnnnnnnnnnnnnnnnnnnnnnnnnnnnnnnnnnnnnnnnnnnnnnnnnnnnnnnnnnnnnnnnnnnnnnnnnnnnnnnnnnnnnnnnnnnnnnnnnnnnnnnnnnnnnnnnnnnnnnnnnnnnnnnnnnnnnnnnnnnnnnnnnnnnnnnnnnnnnnnnnnnnnnnnnnnnnnnnnnnnnnnnnnnnnnnnnnnnnnnnnnnnnnnnnnnnnnnnnnnnnnnnnnnnnnnnnnnnnnnnnnnnnnnnnnnnnnnnnnnnnnnnnnnnnnnnnnnnnnnnnnnnnnnnnnnnnnnnnnnnnnnnnnnnnnnnnnnnnnnnnnnnnnnnnnnnnnnnnnnnnnnnnnnnnnnnnnnnnnnnnnnnnnnnnnnnnnnnnnnnnnnnnnnnnnnnnnnnnnnnnnnnnnnnnnnnnnnnnnnnnnnnnnnnnnnnnnnnnnnnnnnnnnnnnnnnnnnnnnnnnnnnnnnnnnnnnnnnnnnnnnnnnnnnnnnnnnnnnnnnnnnnnnnnnnnnnnnnnnnnnnnnnnnnnnnnnnnnnnnnnnnnnnnnnnnnnnnnnnnnnnnnnnnnnnnnnnnnnnnnnnnnnnnnnnnnnnnnnnnnnnnnnnnnnnnnnnnnnnnnnnnnnnnnnnnnnnnnnnnnnnnnnnnnnnnnnnnnnnnnnnnnnnnnnnnnnnnnnnnnnnnnnnnnnnnnnnnnnnnnnnnnnnnnnnnnnnnnnnnnnnnnnnnnnnnnnnnnnnnnnnnnnnnnnnnnnnnnnnnnnnnnnnnnnnnnnnnnnnnnnnnnnnnnnnnnnnnnnnnnnnnnnnnnnnnnnnnnnnnnnnnnnnnnnnnnnnnnnnnnnnnnnnnnnnnnnnnnnnnnnnnnnnnnnnnnnnnnnnnnnnnnnnnnnnnnnnnnnnnnnnnnnnnnnnnnnnnnnnnnnnnnnnnnnnnnnnnnnnnnnnnnnnnnnnnnnnnnnnnnnnnnnnnnnnnnnnnnnnnnnnnnnnnnnnnnnnnnnnnnnnnnnnnnnnnnnnnnnnnnnnnnnnnnnnnnnnnnnnnnnnnnnnnnnnnnnnnnnnnnnnnnnnnnnnnnnnnnnnnnnnnnnnnnnnnnnnnnnnnnnnnnnnnnnnnnnnnnnnnnnnnnnnnnnnnnnnnnnnnnnnnnnnnnnnnnnnnnnnnnnnnnnnnnnnnnnnnnnnnnnnnnnnnnnnnnnnnnnnnnnnnnnnnnnnnnnnnnnnnnnnnnnnnnnnnnnnnnnnnnnnnnnnnnnnnnnnnnnnnnnnnnnnnnnnnnnnnnnnnnnnnnnnnnnnnnnnnnnnnnnnnnnnnnnnnnnnnnnnnnnnnnnnnnnnnnnnnnnnnnnnnnnnnnnnnnnnnnnnnnnnnnnnnnnnnnnnnnnnnnnnnnnnnnnnnnnnnnnnnnnnnnnnnnnnnnnnnnnnnnnnnnnnnnnnnnnnnnnnnnnnnnnnnnnnnnnnnnnnnnnnnnnnnnnnnnnnnnnnnnnnnnnnnnnnnnnnnnnnnnnnnnnnnnnnnnnnnnnnnnnnnnnnnnnnnnnnnnnnnnnnnnnnnnnnnnnnnnnnnnnnnnnnnnnnnnnnnnnnnnnnnnnnnnnnnnnnnnnnnnnnnnnnnnnnnnnnnnnnnnnnnnnnnnnnnnnnnnnnnnnnnnnnnnnnnnnnnnnnnnnnnnnnnnnnnnnnnnnnnnnnnnnnnnnnnnnnnnnnnnnnnnnnnnnnnnnnnnnnnnnnnnnnnnnnnnnnnnnnnnnnnnnnnnnnnnnnnnnnnnnnnnnnnnnnnnnnnnnnnnnnnnnnnnnnnnnnnnnnnnnnnnnnnnnnnnnnnnnnnnnnnnnnnnnnnnnnnnnnnnnnnnnnnnnnnnnnnnnnnnnnnnnnnnnnnnnnnnnnnnnnnnnnnnnnnnnnnnnnnnnnnnnnnnnnnnnnnnnnnnnnnnnnnnnnnnnnnnnnnnnnnnnnnnnnnnnnnnnnnnnnnnnnnnnnnnnnnnnnnnnnnnnnnnnnnnnnnnnnnnnnnnnnnnnnnnnnnnnnnnnnnnnnnnnnnnnnnnnnnnnnnnnnnnnnnnnnnnnnnnnnnnnnnnnnnnnnnnnnnnnnnnnnnnnnnnnnnnnnnnnnnnnnnnnnnnnnnnnnnnnnnnnnnnnnnnnnnnnnnnnnnnnnnnnnnnnnnnnnnnnnnnnnnnnnnnnnnnnnnnnnnnnnnnnnnnnnnnnnnnnnnnnnnnnnnnnnnnnnnnnnnnnnnnnnnnnnnnnnnnnnnnnnnnnnnnnnnnnnnnnnnnnnnnnnnnnnnnnnnnnnnnnnnnnnnnnnnnnnnnnnnnnnnnnnnnnnnnnnnnnnnnnnnnnnnnnnnnnnnnnnnnnnnnnnnnnnnnnnnnnnnnnnnnnnnnnnnnnnnnnnnnnnnnnnnnnnnnnnnnnnnnnnnnnnnnnnnnnnnnnnnnnnnnnnnnnnnnnnnnnnnnnnnnnnnnnnnnnnnnnnnnnnnnnnnnnnnnnnnnnnnnnnnnnnnnnnnnnnnnnnnnnnnnnnnnnnnnnnnnnnnnnnnnnnnnnnnnnnnnnnnnnnnnnnnnnnnnnnnnnnnnnnnnnnnnnnnnnnnnnnnnnnnnnnnnnnnnnnnnnnnnnnnnnnnnnnnnnnnnnnnnnnnnnnnnnnnnnnnnnnnnnnnnnnnnnnnnnnnnnnnnnnnnnnnnnnnnnnnnnnnnnnnnnnnnnnnnnnnnnnnnnnnnnnnnnnnnnnnnnnnnnnnnnnnnnnnnnnnnnnnnnnnnnnnnnnnnnnnnnnnnnnnnnnnnnnnnnnnnnnnnnnnnnnnnnnnnnnnnnnnnnnnnnnnnnnnnnnnnnnnnnnnnnnnnnnnnnnnnnnnnnnnnnnnnnnnnnnnnnnnnnnnnnnnnnnnnnnnnnnnnnnnnnnnnnnnnnnnnnnnnnnnnnnnnnnnnnnnnnnnnnnnnnnnnnnnnnnnnnnnnnnnnnnnnnnnnnnnnnnnnnnnnnnnnnnnnnnnnnnnnnnnnnnnnnnnnnnnnnnnnnnnnnnnnnnnnnnnnnnnnnnnnnnnnnnnnnnnnnnnnnnnnnnnnnnnnnnnnnnnnnnnnnnnnnnnnnnnnnnnnnnnnnnnnnnnnnnnnnnnnnnnnnnnnnnnnnnnnnnnnnnnnnnnnnnnnnnnnnnnnnnnnnnnnnnnnnnnnnnnnnnnnnnnnnnnnnnnnnnnnnnnnnnnnnnnnnnnnnnnnnnnnnnnnnnnnnnnnnnnnnnnnnnnnnnnnnnnnnnnnnnnnnnnnnnnnnnnnnnnnnnnnnnnnnnnnnnnnnnnnnnnnnnnnnnnnnnnnnnnnnnnnnnnnnnnnnnnnnnnnnnnnnnnnnnnnnnnnnnnnnnnnnnnnnnnnnnnnnnnnnnnnnnnnnnnnnnnnnnnnnnnnnnnnnnnnnnnnnnnnnnnnnnnnnnnnnnnnnnnnnnnnnnnnnnnnnnnnnnnnnnnnnnnnnnnnnnnnnnnnnnnnnnnnnnnnnnnnnnnnnnnnnnnnnnnnnnnnnnnnnnnnnnnnnnnnnnnnnnnnnnnnnnnnnnnnnnnnnnnnnnnnnnnnnnnnnnnnnnnnnnnnnnnnnnnnnnnnnnnnnnnnnnnnnnnnnnnnnnnnnnnnnnnnnnnnnnnnnnnnnnnnnnnnnnnnnnnnnnnnnnnnnnnnnnnnnnnnnnnnnnnnnnnnnnnnnnnnnnnnnnnnnnnnnnnnnnnnnnnnnnnnnnnnnnnnnnnnnnnnnnnnnnnnnnnnnnnnnnnnnnnnnnnnnnnnnnnnnnnnnnnnnnnnnnnnnnnnnnnnnnnnnnnnnnnnnnnnnnnnnnnnnnnnnnnnnnnnnnnnnnnnnnnnnnnnnnnnnnnnnnnnnnnnnnnnnnnnnnnnnnnnnnnnnnnnnnnnnnnnnnnnnnnnnnnnnnnnnnnnnnnnnnnnnnnnnnnnnnnnnnnnnnnnnnnnnnnnnnnnnnnnnnnnnnnnnnnnnnnnnnnnnnnnnnnnnnnnnnnnnnnnnnnnnnnnnnnnnnnnnnnnnnnnnnnnnnnnnnnnnnnnnnnnnnnnnnnnnnnnnnnnnnnnnnnnnnnnnnnnnnnnnnnnnnnnnnnnnnnnnnnnnnnnnnnnnnnnnnnnnnnnnnnnnnnnnnnnnnnnnnnnnnnnnnnnnnnnnnnnnnnnnnnnnnnnnnnnnnnnnnnnnnnnnnnnnnnnnnnnnnnnnnnnnnnnnnnnnnnnnnnnnnnnnnnnnnnnnnnnnnnnnnnnnnnnnnnnnnnnnnnnnnnnnnnnnnnnnnnnnnnnnnnnnnnnnnnnnnnnnnnnnnnnnnnnnnnnnnnnnnnnnnnnnnnnnnnnnnnnnnnnnnnnnnnnnnnnnnnnnnnnnnnnnnnnnnnnnnnnnnnnnnnnnnnnnnnnnnnnnnnnnnnnnnnnnnnnnnnnnnnnnnnnnnnnnnnnnnnnnnnnnnnnnnnnnnnnnnnnnnnnnnnnnnnnnnnnnnnnnnnnnnnnnnnnnnnnnnnnnnnnnnnnnnnnnnnnnnnnnnnnnnnnnnnnnnnnnnnnnnnnnnnnnnnnnnnnnnnnnnnnnnnnnnnnnnnnnnnnnnnnnnnnnnnnnnnnnnnnnnnnnnnnnnnnnnnnnnnnnnnnnnnnnnnnnnnnnnnnnnnnnnnnnnnnnnnnnnnnnnnnnnnnnnnnnnnnnnnnnnnnnnnnnnnnnnnnnnnnnnnnnnnnnnnnnnnnnnnnnnnnnnnnnnnnnnnnnnnnnnnnnnnnnnnnnnnnnnnnnnnnnnnnnnnnnnnnnnnnnnnnnnnnnnnnnnnnnnnnnnnnnnnnnnnnnnnnnnnnnnnnnnnnnnnnnnnnnnnnnnnnnnnnnnnnnnnnnnnnnnnnnnnnnnnnnnnnnnnnnnnnnnnnnnnnnnnnnnnnnnnnnnnnnnnnnnnnnnnnnnnnnnnnnnnnnnnnnnnnnnnnnnnnnnnnnnnnnnnnnnnnnnnnnnnnnnnnnnnnnnnnnnnnnnnnnnnnnnnnnnnnnnnnnnnnnnnnnnnnnnnnnnnnnnnnnnnnnnnnnnnnnnnnnnnnnnnnnnnnnnnnnnnnnnnnnnnnnnnnnnnnnnnnnnnnnnnnnnnnnnnnnnnnnnnnnnnnnnnnnnnnnnnnnnnnnnnnnnnnnnnnnnnnnnnnnnnnnnnnnnnnnnnnnnnnnnnnnnnnnnnnnnnnnnnnnnnnnnnnnnnnnnnnnnnnnnnnnnnnnnnnnnnnnnnnnnnnnnnnnnnnnnnnnnnnnnnnnnnnnnnnnnnnnnnnnnnnnnnnnnnnnnnnnnnnnnnnnnnnnnnnnnnnnnnnnnnnnnnnnnnnnnnnnnnnnnnnnnnnnnnnnnnnnnnnnnnnnnnnnnnnnnnnnnnnnnnnnnnnnnnnnnnnnnnnnnnnnnnnnnnnnnnnnnnnnnnnnnnnnnnnnnnnnnnnnnnnnnnnnnnnnnnnnnnnnnnnnnnnnnnnnnnnnnnnnnnnnnnnnnnnnnnnnnnnnnnnnnnnnnnnnnnnnnnnnnnnnnnnnnnnnnnnnnnnnnnnnnnnnnnnnnnnnnnnnnnnnnnnnnnnnnnnnnnnnnnnnnnnnnnnnnnnnnnnnnnnnnnnnnnnnnnnnnnnnnnnnnnnnnnnnnnnnnnnnnnnnnnnnnnnnnnnnnnnnnnnnnnnnnnnnnnnnnnnnnnnnnnnnnnnnnnnnnnnnnnnnnnnnnnnnnnnnnnnnnnnnnnnnnnnnnnnnnnnnnnnnnnnnnnnnnnnnnnnnnnnnnnnnnnnnnnnnnnnnnnnnnnnnnnnnnnnnnnnnnnnnnnnnnnnnnnnnnnnnnnnnnnnnnnnnnnnnnnnnnnnnnnnnnnnnnnnnnnnnnnnnnnnnnnnnnnnnnnnnnnnnnnnnnnnnnnnnnnnnnnnnnnnnnnnnnnnnnnnnnnnnnnnnnnnnnnnnnnnnnnnnnnnnnnnnnnnnnnnnnnnnnnnnnnnnnnnnnnnnnnnnnnnnnnnnnnnnnnnnnnnnnnnnnnnnnnnnnnnnnnnnnnnnnnnnnnnnnnnnnnnnnnnnnnnnnnnnnnnnnnnnnnnnnnnnnnnnnnnnnnnnnnnnnnnnnnnnnnnnnnnnnnnnnnnnnnnnnnnnnnnnnnnnnnnnnnnnnnnnnnnnnnnnnnnnnnnnnnnnnnnnnnnnnnnnnnnnnnnnnnnnnnnnnnnnnnnnnnnnnnnnnnnnnnnnnnnnnnnnnnnnnnnnnnnnnnnnnnnnnnnnnnnnnnnnnnnnnnnnnnnnnnnnnnnnnnnnnnnnnnnnnnnnnnnnnnnnnnnnnnnnnnnnnnnnnnnnnnnnnnnnnnnnnnnnnnnnnnnnnnnnnnnnnnnnnnnnnnnnnnnnnnnnnnnnnnnnnnnnnnnnnnnnnnnnnnnnnnnnnnnnnnnnnnnnnnnnnnnnnnnnnnnnnnnnnnnnnnnnnnnnnnnnnnnnnnnnnnnnnnnnnnnnnnnnnnnnnnnnnnnnnnnnnnnnnnnnnnnnnnnnnnnnnnnnnnnnnnnnnnnnnnnnnnnnnnnnnnnnnnnnnnnnnnnnnnnnnnnnnnnnnnnnnnnnnnnnnnnnnnnnnnnnnnnnnnnnnnnnnnnnnnnnnnnnnnnnnnnnnnnnnnnnnnnnnnnnnnnnnnnnnnnnnnnnnnnnnnnnnnnnnnnnnnnnnnnnnnnnnnnnnnnnnnnnnnnnnnnnnnnnnnnnnnnnnnnnnnnnnnnnnnnnnnnnnnnnnnnnnnnnnnnnnnnnnnnnnnnnnnnnnnnnnnnnnnnnnnnnnnnnnnnnnnnnnnnnnnnnnnnnnnnnnnnnnnnnnnnnnnnnnnnnnnnnnnnnnnnnnnnnnnnnnnnnnnnnnnnnnnnnnnnnnnnnnnnnnnnnnnnnnnnnnnnnnnnnnnnnnnnnnnnnnnnnnnnnnnnnnnnnnnnnnnnnnnnnnnnnnnnnnnnnnnnnnnnnnnnnnnnnnnnnnnnnnnnnnnnnnnnnnnnnnnnnnnnnnnnnnnnnnnnnnnnnnnnnnnnnnnnnnnnnnnnnnnnnnnnnnnnnnnnnnnnnnnnnnnnnnnnnnnnnnnnnnnnnnnnnnnnnnnnnnnnnnnnnnnnnnnnnnnnnnnnnnnnnnnnnnnnnnnnnnnnnnnnnnnnnnnnnnnnnnnnnnnnnnnnnnnnnnnnnnnnnnnnnnnnnnnnnnnnnnnnnnnnnnnnnnnnnnnnnnnnnnnnnnnnnnnnnnnnnnnnnnnnnnnnnnnnnnnnnnnnnnnnnnnnnnnnnnnnnnnnnnnnnnnnnnnnnnnnnnnnnnnnnnnnnnnnnnnnnnnnnnnnnnnnnnnnnnnnnnnnnnnnnnnnnnnnnnnnnnnnnnnnnnnnnnnnnnnnnnnnnnnnnnnnnnnnnnnnnnnnnnnnnnnnnnnnnnnnnnnnnnnnnnnnnnnnnnnnnnnnnnnnnnnnnnnnnnnnnnnnnnnnnnnnnnnnnnnnnnnnnnnnnnnnnnnnnnnnnnnnnnnnnnnnnnnnnnnnnnnnnnnnnnnnnnnnnnnnnnnnnnnnnnnnnnnnnnnnnnnnnnnnnnnnnnnnnnnnnnnnnnnnnnnnnnnnnnnnnnnnnnnnnnnnnnnnnnnnnnnnnnnnnnnnnnnnnnnnnnnnnnnnnnnnnnnnnnnnnnnnnnnnnnnnnnnnnnnnnnnnnnnnnnnnnnnnnnnnnnnnnnnnnnnnnnnnnnnnnnnnnnnnnnnnnnnnnnnnnnnnnnnnnnnnnnnnnnnnnnnnnnnnnnnnnnnnnnnnnnnnnnnnnnnnnnnnnnnnnnnnnnnnnnnnnnnnnnnnnnnnnnnnnnnnnnnnnnnnnnnnnnnnnnnnnnnnnnnnnnnnnnnnnnnnnnnnnnnnnnnnnnnnnnnnnnnnnnnnnnnnnnnnnnnnnnnnnnnnnnnnnnnnnnnnnnnnnnnnnnnnnnnnnnnnnnnnnnnnnnnnnnnnnnnnnnnnnnnnnnnnnnnnnnnnnnnnnnnnnnnnnnnnnnnnnnnnnnnnnnnnnnnnnnnnnnnnnnnnnnnnnnnnnnnnnnnnnnnnnnnnnnnnnnnnnnnnnnnnnnnnnnnnnnnnnnnnnnnnnnnnnnnnnnnnnnnnnnnnnnnnnnnnnnnnnnnnnnnnnnnnnnnnnnnnnnnnnnnnnnnnnnnnnnnnnnnnnnnnnnnnnnnnnnnnnnnnnnnnnnnnnnnnnnnnnnnnnnnnnnnnnnnnnnnnnnnnnnnnnnnnnnnnnnnnnnnnnnnnnnnnnnnnnnnnnnnnnnnnnnnnnnnnnnnnnnnnnnnnnnnnnnnnnnnnnnnnnnnnnnnnnnnnnnnnnnnnnnnnnnnnnnnnnnnnnnnnnnnnnnnnnnnnnnnnnnnnnnnnnnnnnnnnnnnnnnnnnnnnnnnnnnnnnnnnnnnnnnnnnnnnnnnnnnnnnnnnnnnnnnnnnnnnnnnnnnnnnnnnnnnnnnnnnnnnnnnnnnnnnnnnnnnnnnnnnnnnnnnnnnnnnnnnnnnnnnnnnnnnnnnnnnnnnnnnnnnnnnnnnnnnnnnnnnnnnnnnnnnnnnnnnnnnnnnnnnnnnnnnnnnnnnnnnnnnnnnnnnnnnnnnnnnnnnnnnnnnnnnnnnnnnnnnnnnnnnnnnnnnnnnnnnnnnnnnnnnnnnnnnnnnnnnnnnnnnnnnnnnnnnnnnnnnnnnnnnnnnnnnnnnnnnnnnnnnnnnnnnnnnnnnnnnnnnnnnnnnnnnnnnnnnnnnnnnnnnnnnnnnnnnnnnnnnnnnnnnnnnnnnnnnnnnnnnnnnnnnnnnnnnnnnnnnnnnnnnnnnnnnnnnnnnnnnnnnnnnnnnnnnnnnnnnnnnnnnnnnnnnnnnnnnnnnnnnnnnnnnnnnnnnnnnnnnnnnnnnnnnnnnnnnnnnnnnnnnnnnnnnnnnnnnnnnnnnnnnnnnnnnnnnnnnnnnnnnnnnnnnnnnnnnnnnnnnnnnnnnnnnnnnnnnnnnnnnnnnnnnnnnnnnnnnnnnnnnnnnnnnnnnnnnnnnnnnnnnnnnnnnnnnnnnnnnnnnnnnnnnnnnnnnnnnnnnnnnnnnnnnnnnnnnnnnnnnnnnnnnnnnnnnnnnnnnnnnnnnnnnnnnnnnnnnnnnnnnnnnnnnnnnnnnnnnnnnnnnnnnnnnnnnnnnnnnnnnnnnnnnnnnnnnnnnnnnnnnnnnnnnnnnnnnnnnnnnnnnnnnnnnnnnnnnnnnnnnnnnnnnnnnnnnnnnnnnnnnnnnnnnnnnnnnnnnnnnnnnnnnnnnnnnnnnnnnnnnnnnnnnnnnnnnnnnnnnnnnnnnnnnnnnnnnnnnnnnnnnnnnnnnnnnnnnnnnnnnnnnnnnnnnnnnnnnnnnnnnnnnnnnnnnnnnnnnnnnnnnnnnnnnnnnnnnnnnnnnnnnnnnnnnnnnnnnnnnnnnnnnnnnnnnnnnnnnnnnnnnnnnnnnnnnnnnnnnnnnnnnnnnnnnnnnnnnnnnnnnnnnnnnnnnnnnnnnnnnnnnnnnnnnnnnnnnnnnnnnnnnnnnnnnnnnnnnnnnnnnnnnnnnnnnnnnnnnnnnnnnnnnnnnnnnnnnnnnnnnnnnnnnnnnnnnnnnnnnnnnnnnnnnnnnnnnnnnnnnnnnnnnnnnnnnnnnnnnnnnnnnnnnnnnnnnnnnnnnnnnnnnnnnnnnnnnnnnnnnnnnnnnnnnnnnnnnnnnnnnnnnnnnnnnnnnnnnnnnnnnnnnnnnnnnnnnnnnnnnnnnnnnnnnnnnnnnnnnnnnnnnnnnnnnnnnnnnnnnnnnnnnnnnnnnnnnnnnnnnnnnnnnnnnnnnnnnnnnnnnnnnnnnnnnnnnnnnnnnnnnnnnnnnnnnnnnnnnnnnnnnnnnnnnnnnnnnnnnnnnnnnnnnnnnnnnnnnnnnnnnnnnnnnnnnnnnnnnnnnnnnnnnnnnnnnnnnnnnnnnnnnnnnnnnnnnnnnnnnnnnnnnnnnnnnnnnnnnnnnnnnnnnnnnnnnnnnnnnnnnnnnnnnnnnnnnnnnnnnnnnnnnnnnnnnnnnnnnnnnnnnnnnnnnnnnnnnnnnnnnnnnnnnnnnnnnnnnnnnnnnnnnnnnnnnnnnnnnnnnnnnnnnnnnnnnnnnnnnnnnnnnnnnnnnnnnnnnnnnnnnnnnnnnnnnnnnnnnnnnnnnnnnnnnnnnnnnnnnnnnnnnnnnnnnnnnnnnnnnnnnnnnnnnnnnnnnnnnnnnnnnnnnnnnnnnnnnnnnnnnnnnnnnnnnnnnnnnnnnnnnnnnnnnnnnnnnnnnnnnnnnnnnnnnnnnnnnnnnnnnnnnnnnnnnnnnnnnnnnnnnnnnnnnnnnnnnnnnnnnnnnnnnnnnnnnnnnnnnnnnnnnnnnnnnnnnnnnnnnnnnnnnnnnnnnnnnnnnnnnnnnnnnnnnnnnnnnnnnnnnnnnnnnnnnnnnnnnnnnnnnnnnnnnnnnnnnnnnnnnnnnnnnnnnnnnnnnnnnnnnnnnnnnnnnnnnnnnnnnnnnnnnnnnnnnnnnnnnnnnnnnnnnnnnnnnnnnnnnnnnnnnnnnnnnnnnnnnnnnnnnnnnnnnnnnnnnnnnnnnnnnnnnnnnnnnnnnnnnnnnnnnnnnnnnnnnnnnnnnnnnnnnnnnnnnnnnnnnnnnnnnnnnnnnnnnnnnnnnnnnnnnnnnnnnnnnnnnnnnnnnnnnnnnnnnnnnnnnnnnnnnnnnnnnnnnnnnnnnnnnnnnnnnnnnnnnnnnnnnnnnnnnnnnnnnnnnnnnnnnnnnnnnnnnnnnnnnnnnnnnnnnnnnnnnnnnnnnnnnnnnnnnnnnnnnnnnnnnnnnnnnnnnnnnnnnnnnnnnnnnnnnnnnnnnnnnnnnnnnnnnnnnnnnnnnnnnnnnnnnnnnnnnnnnnnnnnnnnnnnnnnnnnnnnnnnnnnnnnnnnnnnnnnnnnnnnnnnnnnnnnnnnnnnnnnnnnnnnnnnnnnnnnnnnnnnnnnnnnnnnnnnnnnnnnnnnnnnnnnnnnnnnnnnnnnnnnnnnnnnnnnnnnnnnnnnnnnnnnnnnnnnnnnnnnnnnnnnnnnnnnnnnnnnnnnnnnnnnnnnnnnnnnnnnnnnnnnnnnnnnnnnnnnnnnnnnnnnnnnnnnnnnnnnnnnnnnnnnnnnnnnnnnnnnnnnnnnnnnnnnnnnnnnnnnnnnnnnnnnnnnnnnnnnnnnnnnnnnnnnnnnnnnnnnnnnnnnnnnnnnnnnnnnnnnnnnnnnnnnnnnnnnnnnnnnnnnnnnnnnnnnnnnnnnnnnnnnnnnnnnnnnnnnnnnnnnnnnnnnnnnnnnnnnnnnnnnnnnnnnnnnnnnnnnnnnnnnnnnnnnnnnnnnnnnnnnnnnnnnnnnnnnnnnnnnnnnnnnnnnnnnnnnnnnnnnnnnnnnnnnnnnnnnnnnnnnnnnnnnnnnnnnnnnnnnnnnnnnnnnnnnnnnnnnnnnnnnnnnnnnnnnnnnnnnnnnnnnnnnnnnnnnnnnnnnnnnnnnnnnnnnnnnnnnnnnnnnnnnnnnnnnnnnnnnnnnnnnnnnnnnnnnnnnnnnnnnnnnnnnnnnnnnnnnnnnnnnnnnnnnnnnnnnnnnnnnnnnnnnnnnnnnnnnnnnnnnnnnnnnnnnnnnnnnnnnnnnnnnnnnnnnnnnnnnnnnnnnnnnnnnnnnnnnnnnnnnnnnnnnnnnnnnnnnnnnnnnnnnnnnnnnnnnnnnnnnnnnnnnnnnnnnnnnnnnnnnnnnnnnnnnnnnnnnnnnnnnnnnnnnnnnnnnnnnnnnnnnnnnnnnnnnnnnnnnnnnnnnnnnnnnnnnnnnnnnnnnnnnnnnnnnnnnnnnnnnnnnnnnnnnnnnnnnnnnnnnnnnnnnnnnnnnnnnnnnnnnnnnnnnnnnnnnnnnnnnnnnnnnnnnnnnnnnnnnnnnnnnnnnnnnnnnnnnnnnnnnnnnnnnnnnnnnnnnnnnnnnnnnnnnnnnnnnnnnnnnnnnnnnnnnnnnnnnnnnnnnnnnnnnnnnnnnnnnnnnnnnnnnnnnnnnnnnnnnnnnnnnnnnnnnnnnnnnnnnnnnnnnnnnnnnnnnnnnnnnnnnnnnnnnnnnnnnnnnnnnnnnnnnnnnnnnnnnnnnnnnnnnnnnnnnnnnnnnnnnnnnnnnnnnnnnnnnnnnnnnnnnnnnnnnnnnnnnnnnnnnnnnnnnnnnnnnnnnnnnnnnnnnnnnnnnnnnnnnnnnnnnnnnnnnnnnnnnnnnnnnnnnnnnnnnnnnnnnnnnnnnnnnnnnnnnnnnnnnnnnnnnnnnnnnnnnnnnnnnnnnnnnnnnnnnnnnnnnnnnnnnnnnnnnnnnnnnnnnnnnnnnnnnnnnnnnnnnnnnnnnnnnnnnnnnnnnnnnnnnnnnnnnnnnnnnnnnnnnnnnnnnnnnnnnnnnnnnnnnnnnnnnnnnnnnnnnnnnnnnnnnnnnnnnnnnnnnnnnnnnnnnnnnnnnnnnnnnnnnnnnnnnnnnnnnnnnnnnnnnnnnnnnnnnnnnnnnnnnnnnnnnnnnnnnnnnnnnnnnnnnnnnnnnnnnnnnnnnnnnnnnnnnnnnnnnnnnnnnnnnnnnnnnnnnnnnnnnnnnnnnnnnnnnnnnnnnnnnnnnnnnnnnnnnnnnnnnnnnnnnnnnnnnnnnnnnnnnnnnnnnnnnnnnnnnnnnnnnnnnnnnnnnnnnnnnnnnnnnnnnnnnnnnnnnnnnnnnnnnnnnnnnnnnnnnnnnnnnnnnnnnnnnnnnnnnnnnnnnnnnnnnnnnnnnnnnnnnnnnnnnnnnnnnnnnnnnnnnnnnnnnnnnnnnnnnnnnnnnnnnnnnnnnnnnnnnnnnnnnnnnnnnnnnnnnnnnnnnnnnnnnnnnnnnnnnnnnnnnnnnnnnnnnnnnnnnnnnnnnnnnnnnnnnnnnnnnnnnnnnnnnnnnnnnnnnnnnnnnnnnnnnnnnnnnnnnnnnnnnnnnnnnnnnnnnnnnnnnnnnnnnnnnnnnnnnnnnnnnnnnnnnnnnnnnnnnnnnnnnnnnnnnnnnnnnnnnnnnnnnnnnnnnnnnnnnnnnnnnnnnnnnnnnnnnnnnnnnnnnnnnnnnnnnnnnnnnnnnnnnnnnnnnnnnnnnnnnnnnnnnnnnnnnnnnnnnnnnnnnnnnnnnnnnnnnnnnnnnnnnnnnnnnnnnnnnnnnnnnnnnnnnnnnnnnnnnnnnnnnnnnnnnnnnnnnnnnnnnnnnnnnnnnnnnnnnnnnnnnnnnnnnnnnnnnnnnnnnnnnnnnnnnnnnnnnnnnnnnnnnnnnnnnnnnnnnnnnnnnnnnnnnnnnnnnnnnnnnnnnnnnnnnnnnnnnnnnnnnnnnnnnnnnnnnnnnnnnnnnnnnnnnnnnnnnnnnnnnnnnnnnnnnnnnnnnnnnnnnnnnnnnnnnnnnnnnnnnnnnnnnnnnnnnnnnnnnnnnnnnnnnnnnnnnnnnnnnnnnnnnnnnnnnnnnnnnnnnnnnnnnnnnnnnnnnnnnnnnnnnnnnnnnnnnnnnnnnnnnnnnnnnnnnnnnnnnnnnnnnnnnnnnnnnnnnnnnnnnnnnnnnnnnnnnnnnnnnnnnnnnnnnnnnnnnnnnnnnnnnnnnnnnnnnnnnnnnnnnnnnnnnnnnnnnnnnnnnnnnnnnnnnnnnnnnnnnnnnnnnnnnnnnnnnnnnnnnnnnnnnnnnnnnnnnnnnnnnnnnnnnnnnnnnnnnnnnnnnnnnnnnnnnnnnnnnnnnnnnnnnnnnnnnnnnnnnnnnnnnnnnnnnnnnnnnnnnnnnnnnnnnnnnnnnnnnnnnnnnnnnnnnnnnnnnnnnnnnnnnnnnnnnnnnnnnnnnnnnnnnnnnnnnnnnnnnnnnnnnnnnnnnnnnnnnnnnnnnnnnnnnnnnnnnnnnnnnnnnnnnnnnnnnnnnnnnnnnnnnnnnnnnnnnnnnnnnnnnnnnnnnnnnnnnnnnnnnnnnnnnnnnnnnnnnnnnnnnnnnnnnnnnnnnnnnnnnnnnnnnnnnnnnnnnnnnnnnnnnnnnnnnnnnnnnnnnnnnnnnnnnnnnnnnnnnnnnnnnnnnnnnnnnnnnnnnnnnnnnnnnnnnnnnnnnnnnnnnnnnnnnnnnnnnnnnnnnnnnnnnnnnnnnnnnnnnnnnnnnnnnnnnnnnnnnnnnnnnnnnnnnnnnnnnnnnnnnnnnnnnnnnnnnnnnnnnnnnnnnnnnnnnnnnnnnnnnnnnnnnnnnnnnnnnnnnnnnnnnnnnnnnnnnnnnnnnnnnnnnnnnnnnnnnnnnnnnnnnnnnnnnnnnnnnnnnnnnnnnnnnnnnnnnnnnnnnnnnnnnnnnnnnnnnnnnnnnnnnnnnnnnnnnnnnnnnnnnnnnnnnnnnnnnnnnnnnnnnnnnnnnnnnnnnnnnnnnnnnnnnnnnnnnnnnnnnnnnnnnnnnnnnnnnnnnnnnnnnnnnnnnnnnnnnnnnnnnnnnnnnnnnnnnnnnnnnnnnnnnnnnnnnnnnnnnnnnnnnnnnnnnnnnnnnnnnnnnnnnnnnnnnnnnnnnnnnnnnnnnnnnnnnnnnnnnnnnnnnnnnnnnnnnnnnnnnnnnnnnnnnnnnnnnnnnnnnnnnnnnnnnnnnnnnnnnnnnnnnnnnnnnnnnnnnnnnnnnnnnnnnnnnnnnnnnnnnnnnnnnnnnnnnnnnnnnnnnnnnnnnnnnnnnnnnnnnnnnnnnnnnnnnnnnnnnnnnnnnnnnnnnnnnnnnnnnnnnnnnnnnnnnnnnnnnnnnnnnnnnnnnnnnnnnnnnnnnnnnnnnnnnnnnnnnnnnnnnnnnnnnnnnnnnnnnnnnnnnnnnnnnnnnnnnnnnnnnnnnnnnnnnnnnnnnnnnnnnnnnnnnnnnnnnnnnnnnnnnnnnnnnnnnnnnnnnnnnnnnnnnnnnnnnnnnnnnnnnnnnnnnnnnnnnnnnnnnnnnnnnnnnnnnnnnnnnnnnnnnnnnnnnnnnnnnnnnnnnnnnnnnnnnnnnnnnnnnnnnnnnnnnnnnnnnnnnnnnnnnnnnnnnnnnnnnnnnnnnnnnnnnnnnnnnnnnnnnnnnnnnnnnnnnnnnnnnnnnnnnnnnnnnnnnnnnnnnnnnnnnnnnnnnnnnnnnnnnnnnnnnnnnnnnnnnnnnnnnnnnnnnnnnnnnnnnnnnnnnnnnnnnnnnnnnnnnnnnnnnnnnnnnnnnnnnnnnnnnnnnnnnnnnnnnnnnnnnnnnnnnnnnnnnnnnnnnnnnnnnnnnnnnnnnnnnnnnnnnnnnnnnnnnnnnnnnnnnnnnnnnnnnnnnnnnnnnnnnnnnnnnnnnnnnnnnnnnnnnnnnnnnnnnnnnnnnnnnnnnnnnnnnnnnnnnnnnnnnnnnnnnnnnnnnnnnnnnnnnnnnnnnnnnnnnnnnnnnnnnnnnnnnnnnnnnnnnnnnnnnnnnnnnnnnnnnnnnnnnnnnnnnnnnnnnnnnnnnnnnnnnnnnnnnnnnnnnnnnnnnnnnnnnnnnnnnnnnnnnnnnnnnnnnnnnnnnnnnnnnnnnnnnnnnnnnnnnnnnnnnnnnnnnnnnnnnnnnnnnnnnnnnnnnnnnnnnnnnnnnnnnnnnnnnnnnnnnnnnnnnnnnnnnnnnnnnnnnnnnnnnnnnnnnnnnnnnnnnnnnnnnnnnnnnnnnnnnnnnnnnnnnnnnnnnnnnnnnnnnnnnnnnnnnnnnnnnnnnnnnnnnnnnnnnnnnnnnnnnnnnnnnnnnnnnnnnnnnnnnnnnnnnnnnnnnnnnnnnnnnnnnnnnnnnnnnnnnnnnnnnnnnnnnnnnnnnnnnnnnnnnnnnnnnnnnnnnnnnnnnnnnnnnnnnnnnnnnnnnnnnnnnnnnnnnnnnnnnnnnnnnnnnnnnnnnnnnnnnnnnnnnnnnnnnnnnnnnnnnnnnnnnnnnnnnnnnnnnnnnnnnnnnnnnnnnnnnnnnnnnnnnnnnnnnnnnnnnnnnnnnnnnnnnnnnnnnnnnnnnnnnnnnnnnnnnnnnnnnnnnnnnnnnnnnnnnnnnnnnnnnnnnnnnnnnnnnnnnnnnnnnnnnnnnnnnnnnnnnnnnnnnnnnnnnnnnnnnnnnnnnnnnnnnnnnnnnnnnnnnnnnnnnnnnnnnnnnnnnnnnnnnnnnnnnnnnnnnnnnnnnnnnnnnnnnnnnnnnnnnnnnnnnnnnnnnnnnnnnnnnnnnnnnnnnnnnnnnnnnnnnnnnnnnnnnnnnnnnnnnnnnnnnnnnnnnnnnnnnnnnnnnnnnnnnnnnnnnnnnnnnnnnnnnnnnnnnnnnnnnnnnnnnnnnnnnnnnnnnnnnnnnnnnnnnnnnnnnnnnnnnnnnnnnnnnnnnnnnnnnnnnnnnnnnnnnnnnnnnnnnnnnnnnnnnnnnnnnnnnnnnnnnnnnnnnnnnnnnnnnnnnnnnnnnnnnnnnnnnnnnnnnnnnnnnnnnnnnnnnnnnnnnnnnnnnnnnnnnnnnnnnnnnnnnnnnnnnnnnnnnnnnnnnnnnnnnnnnnnnnnnnnnnnnnnnnnnnnnnnnnnnnnnnnnnnnnnnnnnnnnnnnnnnnnnnnnnnnnnnnnnnnnnnnnnnnnnnnnnnnnnnnnnnnnnnnnnnnnnnnnnnnnnnnnnnnnnnnnnnnnnnnnnnnnnnnnnnnnnnnnnnnnnnnnnnnnnnnnnnnnnnnnnnnnnnnnnnnnnnnnnnnnnnnnnnnnnnnnnnnnnnnnnnnnnnnnnnnnnnnnnnnnnnnnnnnnnnnnnnnnnnnnnnnnnnnnnnnnnnnnnnnnnnnnnnnnnnnnnnnnnnnnnnnnnnnnnnnnnnnnnnnnnnnnnnnnnnnnnnnnnnnnnnnnnnnnnnnnnnnnnnnnnnnnnnnnnnnnnnnnnnnnnnnnnnnnnnnnnnnnnnnnnnnnnnnnnnnnnnnnnnnnnnnnnnnnnnnnnnnnnnnnnnnnnnnnnnnnnnnnnnnnnnnnnnnnnnnnnnnnnnnnnnnnnnnnnnnnnnnnnnnnnnnnnnnnnnnnnnnnnnnnnnnnnnnnnnnnnnnnnnnnnnnnnnnnnnnnnnnnnnnnnnnnnnnnnnnnnnnnnnnnnnnnnnnnnnnnnnnnnnnnnnnnnnnnnnnnnnnnnnnnnnnnnnnnnnnnnnnnnnnnnnnnnnnnnnnnnnnnnnnnnnnnnnnnnnnnnnnnnnnnnnnnnnnnnnnnnnnnnnnnnnnnnnnnnnnnnnnnnnnnnnnnnnnnnnnnnnnnnnnnnnnnnnnnnnnnnnnnnnnnnnnnnnnnnnnnnnnnnnnnnnnnnnnnnnnnnnnnnnnnnnnnnnnnnnnnnnnnnnnnnnnnnnnnnnnnnnnnnnnnnnnnnnnnnnnnnnnnnnnnnnnnnnnnnnnnnnnnnnnnnnnnnnnnnnnnnnnnnnnnnnnnnnnnnnnnnnnnnnnnnnnnnnnnnnnnnnnnnnnnnnnnnnnnnnnnnnnnnnnnnnnnnnnnnnnnnnnnnnnnnnnnnnnnnnnnnnnnnnnnnnnnnnnnnnnnnnnnnnnnnnnnnnnnnnnnnnnnnnnnnnnnnnnnnnnnnnnnnnnnnnnnnnnnnnnnnnnnnnnnnnnnnnnnnnnnnnnnnnnnnnnnnnnnnnnnnnnnnnnnnnnnnnnnnnnnnnnnnnnnnnnnnnnnnnnnnnnnnnnnnnnnnnnnnnnnnnnnnnnnnnnnnnnnnnnnnnnnnnnnnnnnnnnnnnnnnnnnnnnnnnnnnnnnnnnnnnnnnnnnnnnnnnnnnnnnnnnnnnnnnnnnnnnnnnnnnnnnnnnnnnnnnnnnnnnnnnnnnnnnnnnnnnnnnnnnnnnnnnnnnnnnnnnnnnnnnnnnnnnnnnnnnnnnnnnnnnnnnnnnnnnnnnnnnnnnnnnnnnnnnnnnnnnnnnnnnnnnnnnnnnnnnnnnnnnnnnnnnnnnnnnnnnnnnnnnnnnnnnnnnnnnnnnnnnnnnnnnnnnnnnnnnnnnnnnnnnnnnnnnnnnnnnnnnnnnnnnnnnnnnnnnnnnnnnnnnnnnnnnnnnnnnnnnnnnnnnnnnnnnnnnnnnnnnnnnnnnnnnnnnnnnnnnnnnnnnnnnnnnnnnnnnnnnnnnnnnnnnnnnnnnnnnnnnnnnnnnnnnnnnnnnnnnnnnnnnnnnnnnnnnnnnnnnnnnnnnnnnnnnnnnnnnnnnnnnnnnnnnnnnnnnnnnnnnnnnnnnnnnnnnnnnnnnnnnnnnnnnnnnnnnnnnnnnnnnnnnnnnnnnnnnnnnnnnnnnnnnnnnnnnnnnnnnnnnnnnnnnnnnnnnnnnnnnnnnnnnnnnnnnnnnnnnnnnnnnnnnnnnnnnnnnnnnnnnnnnnnnnnnnnnnnnnnnnnnnnnnnnnnnnnnnnnnnnnnnnnnnnnnnnnnnnnnnnnnnnnnnnnnnnnnnnnnnnnnnnnnnnnnnnnnnnnnnnnnnnnnnnnnnnnnnnnnnnnnnnnnnnnnnnnnnnnnnnnnnnnnnnnnnnnnnnnnnnnnnnnnnnnnnnnnnnnnnnnnnnnnnnnnnnnnnnnnnnnnnnnnnnnnnnnnnnnnnnnnnnnnnnnnnnnnnnnnnnnnnnnnnnnnnnnnnnnnnnnnnnnnnnnnnnnnnnnnnnnnnnnnnnnnnnnnnnnnnnnnnnnnnnnnnnnnnnnnnnnnnnnnnnnnnnnnnnnnnnnnnnnnnnnnnnnnnnnnnnnnnnnnnnnnnnnnnnnnnnnnnnnnnnnnnnnnnnnnnnnnnnnnnnnnnnnnnnnnnnnnnnnnnnnnnnnnnnnnnnnnnnnnnnnnnnnnnnnnnnnnnnnnnnnnnnnnnnnnnnnnnnnnnnnnnnnnnnnnnnnnnnnnnnnnnnnnnnnnnnnnnnnnnnnnnnnnnnnnnnnnnnnnnnnnnnnnnnnnnnnnnnnnnnnnnnnnnnnnnnnnnnnnnnnnnnnnnnnnnnnnnnnnnnnnnnnnnnnnnnnnnnnnnnnnnnnnnnnnnnnnnnnnnnnnnnnnnnnnnnnnnnnnnnnnnnnnnnnnnnnnnnnnnnnnnnnnnnnnnnnnnnnnnnnnnnnnnnnnnnnnnnnnnnnnnnnnnnnnnnnnnnnnnnnnnnnnnnnnnnnnnnnnnnnnnnnnnnnnnnnnnnnnnnnnnnnnnnnnnnnnnnnnnnnnnnnnnnnnnnnnnnnnnnnnnnnnnnnnnnnnnnnnnnnnnnnnnnnnnnnnnnnnnnnnnnnnnnnnnnnnnnnnnnnnnnnnnnnnnnnnnnnnnnnnnnnnnnnnnnnnnnnnnnnnnnnnnnnnnnnnnnnnnnnnnnnnnnnnnnnnnnnnnnnnnnnnnnnnnnnnnnnnnnnnnnnnnnnnnnnnngatccctaatcccatcaccatggcgatagggtataaacattccacggtgaaggcacaatccacattgtgaggtccaactgctgccatgcagacagttgtgcttttacatgtacaggaaggtcattgaaggctcattgttctgtttcaaaaactgaatcccaagcccacatattattatgctgtgcttcttaaaataagttattagattcgaaataggacacccccaaatatttatatatatatatttaattatagataatataatataaaatatatataatatatatattatagatatttccttttacatcctgcatcctgatattatatatattatatataatataatataaaatatataattatatatattgtataattatatataattatatttatataattatatataattatatttatacaattatatataattatataataatatataatatatactatatacattatatattatataatatataatacatatagtttatattatatataatatataatatatataatatatagtatataatatatactatatattatatataacatatagtttatattatatataatatatagtatataatatatatgatatataatatatcataatataagtacattatattattatatattatattaaacatataatatatatattatatagaatataatattatataatatataataatattaaattaaataataattataatatatattatgatatataatacaatataatatattacatatcttataatatatatgtaatatatatattttatatatgtcatatatattacatatcatatatcatacacaatatataatatatatcatatatgtaatttatatcatatataatatatatcatatataatatattacatatgaaatatattatatatattatatatcacatattatatatcatatatataatgacatatatgtaatatatattatatattatcatatatataatatataatatataatatataatatatataacattttatatacaataaattatatatttcatataatatatattctatgtcatatatattatatataatatatgtaaatgacatagcatatatattatatatatcatatattaggacatattatatatgatatatattatatattacatatgtcatttattatatatatataatttttttttagacagagttttgttctgtttcacaggctggagtgcaatggcgccatgttggctcactgcaaactttacctcacgggttccagcgattgtcctgcctcagcctcccaggtagctgggactacaccacactgggactgcaccagctgccaccacgcctggctaattttttgtagttttagtagagacagggcttcactgtattggccaggatggtcttgatctcctcaccttgtgatcctcttgctttggcctccgaaattgctgggattacaggcctgagccaagatccatattttttaaatgaagaaaaatttcaaaggtactctgcttggtaaaataatcaaatatgtatattgaggaataaaacataaccatgaaacatatttataactgcatatggaaaatacagaggataattttttaaataacaaattttgaaagtattaactaataatttgaaaagatcgcatttgacaggccagtatgaacatacctcgattggaggaacacaggttccccttaagaaaaatcaaaatcagggaaaatgaacccacaaaatttcaatctgctctgacctttgaaaaactcagcccagacagtggcacttatgaccaagggcaggagatttctaatcccatcaccatggcgatagggcataaacattcctgggtgaaggcacaatccacattgtgaggtcctagtgctgccatgcagacaggtgtgcttttacatggaccggaagttcattgaaggctcagtgttttttttcaaaaactgaatcccaaacccacacattattatgctgtgtttcttaaaataagttatgagatgggaaatagggcacccccaaatatagccaatagtgagagtttcaaattgaggaaaggcacaactgatatgttgagaataaacagagattccattctgttttttctttttcaacttttatgttagattcagggtctacatgtgcaggtttattacctgggtgtattgtgtggtgctgaggtttggggtgtgaatgatcccaacacccaggtactgaacatggtattcagcagtttttcaaccttttccttcctccctccccctcctagcagtccctagtgtctattttcaccatcttcatatccatgggtactcagaatttagctcctacttataggaacatgaggcgtttgttttctgttactacattagttcacttcctggattccagctgtagccattttccctcaaagaacataatttcattcttttttgtggctgcatagtattccatggtctatatgtaccacatttttatccagtccactgttgatagtccactgttgatgggcacctaggttgatcccatgtctttgctaatgtgaatagtgttgcaataaacatacaagtgcatatgtctttttggtggaatgatttgttttcttttggatacatattcggtaatgagactgctgggttgaatgttagttcggttttatgttctttgagaaatctccaaattgctttccacagtggctgaactaaattacattcccaccaaaggtgtataagcattcccttttctccttatcctcgccagtatctgctattttttttttttactttttaaaaatagccattctgactggtgtgagataatatctcattgtggttttgatttgcatttccctcgtgattagtgatgatgagcatttttttcatgtttgttggctgcatgtatgtctccttctgagaagtgtctatgtcttttgcccctttttaaatggggttgtgttttgcttgttgaattatgttccttatagattctaaatattagacctttgttggatgcatagtttgtgaataatttcccccattctgtaggttgtttactctgctgatggtttcctttgctgtgtggcagctctttagtttaattaggtcccatttgtcaacttttgcttttgttgcaatttcttttgaagtcttagtcatgaattatttcccatagcccatatccagaatggtacttttgaagtttttcttccaggtttattttagtttgaggtcttaaatttaaatctttaatccaacctgagttaatttttgtatatggtgaaaaggtgaccagttttttgtttttttgtttttgttttttgttttttgagaggtagtcttcctttgtcacgaggctgtagtggagtggtgccatctcagctcacagcaacctccacctgccgggttcaagcgattctcctgcctcagcttcctgagtcactgggattacaggcacgtgctaccacacccagctaatttttgtatttttagtagagacagggtttcaccatgttggcctggctggactcgatcttctgaccttgtgatcctcccacattggcctcccaaagtgctgagatcacagtcatgagccactgtgcctggccaataaggtgcattattaacatcaataaagctcaggaaccagctttcaccatatttttgtttaatttacagtttttctcagagtctttggaatagattcctccctccatgagccagagaacttacaatgttcactgcagtgtctttaaatgtagcagtagcagctgtgggttgagaacacaagtcttccacttttccttttagagccagccattcatggtgctctgtgttcttattcagcattgggtaggggcatctgggtgctgggcatagcaccagtgccccatggaggagggaggcaggaagcccctttcttccttctctaaaaccttttttctttatgtagatccaagtttttagcctatatcattttcttctctctggataacttcttttaacattttgacagatctactgacagcaaatttgtgtttctctgagaaagtctttttcttcactttggaaagataattttgcaggatacagaattttagtttggtggaatttttttgcttgcttgcatgggttctgaagaaaagtttgatgcaatttttattcttattctaacaggtgttaggccctgctaaagcccaaggtggttagactcttgtgaaatggtttccctggggcaggcttttgctaaggagaacggaacacccagggcatatttcaaagtagttacttttccccttccctgtgggaagcaggagggaatttttctctgatgtgcataagagcgtctggcagagctcttggaggttcatgaaagtgtagggccccctaagactgggctcccttaattcttaattctcaagtttatgtgcatggagcctccagcgatttgttgtttacatgtaagtcttcccaccgtggttctggctccagtggccagcctccgatcctgttaggctgggactcactgcctctccaatttgggggataacggttttccctgttaacctcaagtctctgatggatctaagaaaagttgtaattttcagtttgttcaaggtgttttttgttgtcgttgtgaggacaggagtgacagcttccaagctggaaaacagaagtcacatttgggttttgtttcaagatatttttccaatgacagagaatgatgccacacacatttccatagatgtcttttgatgcagatgtgcatgcgtttctgttatcctaagagtgaaatacctgagtcctaaatgtgctcctttctagaacctttattcaatgccaaacacagtatcccctccagcagtgatgagagttcttgttgctccagattctctccaacacttggtgttctatcttttacattttagccgttttggaggatatgttatcctgttgtgatgttaatttgcatttacatgaatactaagaaagctgaacacattcaagttttgcttttataaattacacgtttaagtgttttacccattgttctttctcttagtgatttttaagagctctttacatattgttgatgtgagccctctgtcagttctgtgttcatagatctgtttccactctgcaacttgtcttgtcactttcttagtggtgtctcttaataaacagaaattcttaatttgaatatagtctaatttatcaacttattcccttaaaactatggctcattgtgatctgtttaagaaatctgtccccattcatggtcataaaaatcgtctgggcacggtggctcacacctgtaattccagcactttgggaggtcaaggtgggcagatcacctgagatcaggaattcgagaccagctggccaacatggtgaaaccctgtctctactaaaaacacaaacattagccaggtgtggtggcaggtgcctgtaatcccagctactcgggaggctgaggcaggagaatcacttgagcccaggaggtcaaggccgcaatgagcagtcattgtaccactgcattgcagcctgggtgacagagcaggatgctctttcaaaaataaacataaaagtaaatctgatgagctctaggatttctaatttgaagacagaagcaataaacaaaatgagaaaccaaaatacattcgttttgattaaagccgaggtcagccataactctgaacctaaaaaggaggtcacctgaagcagctgtgagtgagcagggtaagataggaagcagagaaccgatgctcattgccagatcttaggaaaaaaataataaattaggatgacatacttttgcaaaattaaagaaatcccctgaggtgctaatacaaaatttcatttgtgataggactaataaagaaattcagctagtagtgggatctgtcgtggactgagtttgattccaagaacagaagaggcaggaccagtgagaaatagcacagacatatttgcaaaagcagccctcccacgttaggaagaagggatacttttgcacagtgaacagcactacaactgctcatctctttcatgtactatcacacatggaatgactgagatactcctgtgttccacacatagtcctccctgcccctactgaatagagaaacccaatttcaccttggctatctctagatcaattacctgttaataggtctgctgttttctttaccgttagtttcaagaagaactaaatatccccaaatggtatttcagcttccacttaatgaaacctgtcatcttaagccagaccctggcctcagcacaagctccagcgcagaccccagcaaccgctctgcctggtcctgttcttccagggcccttccctggtggccgtgtggtcaggctgcacccagtcattttggcctccactgtggacagctacgagagacgcaacaagggtgctgcccgagttatcgggaccctgttgggaactgtcaacaaacactcagtggaggtcaccagttgcttttcagtgtcacacaatgagtcagatgaagtggctgttgacatggaatttgctaagaacatgtatgaactgcctaaaaagtttctccaaatgagctcatcttggggtggtacgctgcaggccatgacatcacagagcactctgtgctgatccatgagtactacagccgagaggcccccaaccccatccacctcactgtggacacaagtctccagaacggccatatgagcatcaaagcctatgtcagcactttaatgggtgtccctgggaggatcgtgggagtgttcacacctctgacagtgaaatacgcattctatgacactgaatgcatcagagttgacctgatcatgaagacctgctttagccccaacagagtggttggactctcaagtgacttgcagcaagtaggaggggcatcagctcgcatccaggataccctgagcatagtgttgcaatatgcagaggatatactatctggaaaggtgtcagctgacaataccatcaggaaggtgggccacttcctgatgagcctggttaaccaagtaccaaaaatagttcccgatgacttcgagaccatgctccacagcaacatcaatgacctgttgatggtgacctaactggccaacctcacacagtcacagattgccctcaatgaaaaacttgtaaacctgtgaagggaccccaagcagtacgcttgctggtctaggtcttaaccccaggactcagaagtgaaggaaaaatggtttttttgtggtcttgagtcacactgagacagtcaactgtgtatgactctaataatcatagcctaccttttgtaaattaaaaaaaaaaagaagttagtttcctccctggggaatcattatctctaaatgaggagaacccaaagtttcacaaaagggaagaaaaagtctgcaagtgcaaattaggcataatagtgcagggagccccctccccttgactttcagattcatgtgtttttgttgtaagataaataacactacacggtggtcactgactctaagtttataccacacactgtaggacaacatcccaacctcactatgtgttgtttaccagctgggagcattaactgagttacatgattccattccatcatgtcagattcttctaggtgatagggattatgttgtaaatccaatgaattgcacaaacatgagcctaataccatattttttttgcagtgaaatgaattccttagtcaaaaacaatgttgtatgggatatcatgatggtgaataacaaattatttaagttcactcatggtagtaccagcagaaaaattgcaaatgtaaaaggtgagttcgtacccagaataagtgtctatttcagtgagaacaaaatccctgagggatgggtttcaatgtcatcaatctgcaagttgactgggtagcccctgagggaaggctgtcatattagccttagttgttctacattggtccagatacaatttgattatgtaaagtcgtgaataccttctatccttaatattatgtgcatctgttcatgagcccattgaacaagtatcagctgactaacatctattatataacatgtcattgtatgcatacgattactcctcttcagtggattccctctaataagaatttacttgggctacaagtattttcatacttcgtgtctattttaagaagtcatcttcggctgggcttggtggctcacacctgtaatcccagcactttggaaggccaaggtgggcggatcaggaggtcaggagatcaagaacatcgtggctaatacagtgaaatccagtctcgcctaaaaatacaaaaaaattagctgggcctggtggtgggcacctgtagtcccagctactcaggaggctgaggcaggagaatggcgtgaacccagaaggtagagcttgcgagcttgcagtgagctgagatcgcgccactgcactccagcctgggtgacagagtgagactctgtcttgaaaaaaaaaatccaactattcaaaagtaaagaaaaaaatatgtcaatccaccatgtgtccactgcacaccatcacaaattttaaaccatgcatgagctcacattttgaatagaaggatcttggggacaggggacactaaaagccccaaatatggtcctgtgtggcataatggttttttggtaaatgctacactgcatacaatggtggtcgcttaagataacagagctgaaaaattcttaccatctagtaacactgtggccatgatgacatcatagcacaacgcattactcatgtgtttgcagtgaggctggtataagcaaacccactacatttgtcagtggcattaaaggttagcacatctaattatgtaccatatgtcatacttgttaatgataataaatgaccatgtgactagtttatgtacagttgctccttgaacagcatggatttgaaatgcacaagttcacttatatgcaaatttccttctgtttctcccacccctgagacaacaggatcaacttctcctcttctcttcctcaggctgctcaacatgaatatgcagacgaagacctttatgatgatccactttcacttaatgaatagtaaacatattttctcctccttatgattttcttaatagaattttcttttctctttctttaagaatacagtatataattaacaaattatgcattaattgtttatttgatcagcaaagcttgcagttaagaataggctattagtagttaagtttggggatagcccagagttatatatggattttcaactgcacaggagctggtcccctaacccttgcactgttcaaggatcaacagtatttacaatactatacattttattcatattttagagtgtagtacttctactcatgaaaaataattaactataaaacagcgtcgggaaggtctttcaggagttcttccagaagaaagccttgttatcatagaagatgacagctgcatatatgttattgcccttgaagaccctgaagacctttcactgggacaagatttggagatggaagacagtgatattgattatcctgacccttacagggctaagctagtgtgtgtgtttgtatcttagtttttaacaaaaaagtttaaaacataaaaaataaaaataaataaagcttatcgaataaggatataaagtatttctgtacagctgttcaatgtgtttttgttttaagatgtgttattataagaatcaaaaagttaaaaaaattaaaagtttatgaagttacgataagctaagatgaacttgttaaagaaagaaaaatttcaaatacatttagtgtagcctaagtgtacagtgcatataaagtctatagttatgtacagtaatatcctaggcctttgcattcactcaccaagtactcactgactcatcagagcaactgccagtcctgcaacctctgttcatgctaggtgtcctatactggtgtaccactctctttaacttttgtaatatatatatatatatttttttttctttctttttttttgagaaggagttttattttgttgcccaggctggagtgcaatggcacgatcttggctcactgcaacctctgcctctggggttcaagtgattctcctgcctcagcctaatgagtagctgggattacaggcccatgccagcacacccagctaattttgtatttttagtacagatggagtttctccatgttggtcaggctggtctcgaacttctgacctcaggtgatccgcctgcctcggtctcccaatgtactatgtttttactgtatcttttccatgtttagatattactattgtgatataactgcctacagcagtggtccccaaagttttgacaccaaggactggttttgtgaaagataatttttccgcggagtggggatggctttgggctgaaactgttccacttcagatcatcagatcatcaggcattagattctattttttctttttttttttttttagactgagtctcccactgtcgccaggctggagtgcagtggcacaatctcggctcactgcaacctctgcctcctgggttcaagtgattctcctgcctcagccccccgagtagctgggactacaggcatgcgccaccacacccagctaatttttgtattcttagtagagacggggtttccatgttggccagcagtgtcttgaccttgtgatccacctgcctcggcctcccagagtgttgggattacaggcatgagccacagcacccagcctagttagattcttataaggagcacacaacctagatcccttgtatgtgcagttcacaatagggtttgcgctcctgtgaaggtctaatgctgctgctgatctgacaggaggtggagctcaggaagtaatgctcagctggccagccactcatctcctgctttgtgcccagttcctaacaggacacgaaccggtgctggtccatggcttgggtgttggggactactggcctactgtattcagcacagtgacgtgctgcacaggtgtgtagcccaggagcaataggctgtacgatatagcctaggtatgttgtaggctacactgtctaggtttgtataaactacattctatggtgtctgcacagccacaaaatcacgtaatgatgcatttcttggaatatattaccattaaatgagatttacctgtattagtgtcatctcaggtttattgtctagtaattttaaaagtatttgtatattctttcccagacacatcatcatactccggtgcatatctctattttattccctagacccattcttaatttttctacgttctgctttgttccttaggaggctcacctgaattggatactgcagagatctcccttaccctcatgcttttattggggttcagctaatggagggggtggcagaagataggtgagagaagagtgtgtttatcccccacctctgcccctgcagggtcagcacaggcagactgtgtccctttgctgaagatcacagcttctgtctggtgccttcttggcaagctggcactctctctagtcaggtgactgcttggccccttactacttacactcttctgtctggtttctttgtgtctttcctgctgtgctgtaagtagtccctttattagaatccatccacattacccagttatataaagacaaatagttggtcactgatctagttcactccctaagaatcagccttcatcaaagatccctagcagtcagatattctgttggccgctccattcctgctccccattattctagttgtgtcttccttgtctctagtgcaatcacaaagcataagcgcctccactgtcacttgttctaggatcacatcattccccttgaaatcagagaacccacaatctccccaagcccacaaaattcagccgtcacagtacttttcaaacatgccagcagccctccccaacaaacgaatccttaatttcttagagaaacatcttctggggcttcctgtgggacacagtgggggtcggcttggcatgtggatcacacctgatatttttacccccacctcctactattcctattcctttgtatgcacctctctttattatgctaggaaagctctggcaacacaacctcaaaataagcaggccagtgtggattcacagtttctgtcagacaaacttgagcaccccttctaacttcttgggctaagactttaacttcagaatctctatgtatccatgttgataaacttagcctatgtcaagattatattctgcatgccttagtcaaacaccatgtaaatctatgcctcatatattctctaggctttagctgatagggattagcaaagtagtgtggttgttttggtctttaaacaatgtccattttctaccagctttccattgcactcttttttttttttttttgagatggagtcttgctctgtcgcccaggctggagtgcagtggtgcagtctcggctcactgcaagctctgcctcctaggttcacgccattctcctgcctcagcctcccaagtagctgggattacaggcgtgtgccgccacgcgcggctaattttttgtatttttagtagagacggggtctcactgtgttagccaggatggtctcgatctcctgacctcatgatcggcccgccttggcctcccaaagtactgggattacaggcgtgagccaccacgccgggccgactccattgcactcttacagaccatgttgacaaaattataactgcaacagtcaactacaatagcaattttacctctcatataccacttgaaaaaacacatcattcccaataaccacatttgatgatttaagtaatcacgataccaccgtacactacagatgatcaggtttctgtctcctcctgacaagaaggtcaggaattcattccgactaaaacgggtcagcaaaccagttccaggttctcatctgtaaagatctacttctagaggtgtccacctggagcctggtgaacattggacatcaaacaccaggttgacactatttcttcatcttcaacaaaaaccacacaaacaagctttggagaaagaactccctcctctcaatagatggtgctgggataaaacggctagccagttgcagaagaaaaacagtgggcccctgtgtctcaccatgtacagaaattaacgcaagatgaatgaaagctgtaaatgcaagacctcaaactattaaaagcctgcaagggaacctaggaaatacacttcctgacagaggatttggcacagcatggatatgcctaagtccccaaaagcaagtgcaactaaaacaattattgacaagtgggacctaatatataaaagagctgctgaacagcagaagaaattaccaacagagtaaacagaaagcctacacaatgggagaaaatgtccccacatatgcatctcatgaagtctgatttccaggatctacctcaaaaatgttaagcaaataaatcagcaaaacaaaaactcagtgaagaaagggcaaagggcatgaaaacacacatctcaaaggaaggtttatagcaaccaacggacaggacatttctctacctcagtaatcatcagagaaatgcaaagcaaaaggcccatgagatagtatttcacactggtcggaatgacaattatgacacagtccacaagaatgaatgccagcgaggcagaggaggagaggatgctggtctgctgttggtagaaatgcaaactagttcagacaccatggaaaacgatgtggggatttctcaaataactttctcgacatcaccaatcctcacaaaaatgtccacaaaaaccacactaagagtccatctcattccactcagaatgaatactaccaaagacaaacaaaacacaaatttttaaaggtgacagccagtgtagacttacagaagagaaacctcttaaatgctattggtggggatgtaaattagtatacacactatgaaaaacagctagaggttcctgaaaaaattcacagtacaactaccatgtcagctagaagccccatcactggttccacaattaaagcacttgaaatccctaggttgaagagagttacctgccttcccatgggtactaaagcacccctaactgtggccaaggtacaaaaccaacctacctgtccgtacacagcttcagggatgaagaaactgccatacagatacaccacggaatatgtttcagccataaagctttgggaaatcctgccatctgcagccacatgaagaaacctggagaacatcaggtccaacaaatgagcctggcagagaaagtcccatgccacgtgatctcagacatgtagactgaaaaaagctttatctcctagaagtagaaagttcaatagggattaccagaggctgctggggaggtggagagggtcggggaaggaatcagtaatgggtacaaagttactcttagatgacagtaatcaattctggtcttctattctacagcagggtgactagccttaatacaaatgtatcatatatttcaaagtagctagaaggaaagattctgaatgttgttaccactcaaaaagtagtaactatgaggtgaagagatgctaaataacttgattttttcattactcaacatatacatgtatcgaaatcttccttgtaccctctacttatatacacttagtgtatggcaaatagtgttttaagaaatacaaagaaacaatgccaaaatttatgtggaaatacgaaacaccctgaatttctaaagcaatcctgagaaatacaaaccatatgggctgcatcacattccctgagttcgaattaaacgaaaatccctagttaaccaatccatatgttactggcatacacagagaaacacagaccagtgagcaaaatgagagcgctcaataataaacacaaatttacacagagtgaacacatttttcaaaacaccaccaaaacaacacaatggggaaggtttccaaaactagatatccatatgcaaaagaataatacaggactcttgtggtactaaataatacaggactcttgtggtaccaaaaaaaacactttaactcaaaaggattaaagattattcacaaaacttgcaaccataaagctcttataaacacaacctcgagtgtgtgtatatttagggaagcttggatgtatgctcacggtttgcaaaaagtgtggtactaaataatacaaatagtgtgtactaaataataaaaaatatttttattttgtattattttgtatttatactaaataatacaaaatatatttagtgtactaaataatacaaaaagtgtggtactaaataatacagaaataattcacaaaacttgcaaccataaagctcttataaacacaacctcgagtgtgtgtatatttagggaaacttggatgtatgctcacagtttgcaaaaagtaacaaaaatacaagggaaaaatcactgacaatggactgctttggcactgattttgttttttcttgattagtaaacaatagcacactaaccaagaaattatacacatgtggtacctcatcaaactgaagaatttgtgcccaaaaaaggaaagaacgaacaaaatgaaaaggcatactaaaacttataagaaaagtttgggcaaacatacagtggataacaggttacttttgaaaaggcacaagccagtaacactaacagctggcaaaaaaacaaaacaacagagaaataaccagaccaaaattgggcaaataacctgagtagatatttgtgcaaagaagacagaaaacagattcaacatttataaaaacgtggttaacattactactcatgagaaaaatgtagatcaaaaccactctcagatcttatctcactccaactagaatgaacatcacaaaaagattaaaatatttaaaaagaaaattcctagtatgaatttccagaaagggggactgtttgtggaaatgtaaattggtattaacactataaaaaacagttgggggtcctgcaaacaatagaaaaaaaaaaaggaaataccataccatctagcagtcccactactggctatacattcaacctacctgttcacccacagataaagagatcaagaaactctcatatacatacactggggaatattcttcggctatcagaataatcaaacagtgtcatttagagcaacccagatgaacctggaaaacattatgttaaatgtgatgagctaggcctagaaagacaaacactgcatgataccactcatgtgaaatcttaagatgtttatcttaaagaagtagaaagcacaatattggttaccagagtccgggagacagaaggggaatggagaaggattggttatggaaacaaagttatcttaacattaaaagaataaatctgagtgttctcctcagcctggtgactggacttaaccgtattacatttttctaaagagcaaggagaattttgaatgttctctttacacaaaaataatacctgtatgagggaatagagatcctaagtaccctgatttgatcattacccaatatatatgtataaaaatgtacccctaattatggccctttatgttgtaaaaaaattaacagaaataaatacatagtgctaaaaatcacagggaaccacaaaagcaatgaatatctaaaggaatcttgagaaatacaatcaaagtgagaacccataatccttgatatcaaattaaattgccaagttgtagttatgcagtagatatatggtacttgcataaaaagaaatacctagaactatggacaaaaacagggaggacaaaaacaacacaaatatggacacagtcaactgactttgataaagaacaccacaacgtggaaggcagagtctgatcaatgaatagctttgagaaaaatgatatccggatgcaaaagcgagaaacaggacccttattttacacgatgtatgaaaatcaaccgccccccccatcaactgaaggccaaaacaaaataccataaaccacaaaatgttttttaaaaaattactgtgtttacttaagtaaaacacaggttgagcatatattttgggtcacttgaatctctgttaacctttgcaaagaggaaaagaaacaaacaccctggaagaaaaacctcactgacaattaaatgctttgttactgatgcatattttctaatatgggtgaccattatgacacgcataaaacgcaaaaaaaaaaaaatatgggactacatcaacgtgaaaagtttctgcatagcaaagaaaactactttccaaataaaaaagcatcccatagattatgcaaaaatttcaggcaatcatgtaattcacgaggagttgtcaactaacgtgtacacaaaaaagagtacaaagtagaaaaagaatccaatctaatatttcgcaaataacctgaagagacaattctgcacagatataaaatcgaacaacagataagagataaggtcctcaaaattaactattcattagaatactgtaattcaaaaccacacgcagatagtctcacacttattgaatattcctagaaaatttttttaaaaataggagggtctgggagccgtggctcacgtctgtaatcccagcactttgggaagccaaggcgggtggatcacctgaggtcacgagtttcagaccagcctgacaaatatcgtgaaaccccgtctctactaaaaataaaaatacaaaaattacccgggcgtggtggcgggcgcctgtagtcccagctacacaggagaattgcttgaaaccgggaggtagaggttgcagtgagccgagatggcgccactgcgctccagccttggagacagagcgagactccgtctcaaaataacaaaaacaaaaacaaattggaatgggggtttggttttggagaaaggggaactcatacactgtaggtggaaatgaaaattagggtacacaccatggaaaacagttaaatagctggaaactcctcaaagaattgaaactacagatgtcccctgctctagcgaggtctctttctaaaggtcctgaggcataaaaaataaccctagaccccagctcagaggcccgtggggctcggagggacccagtccagcgcttcaccgccggctctgggccagggcgctcctataggctggacgtgggtcggacaggggcatagccttcccggcgggggtgtggacgctgccgaggcccggatcccacaaccgccccaacgctgacgactcgggcccagatgcccacttagaagtgagggcccgaaagcagggagcggccgggaaggagtagggagacccagagggttccaggtggggttcatccccctccacttaccgccgaggcctgccacctcctccaccaacaaacggaagccaccacatcttctccgagactcgctctgaccacgccgccgatgctgcccgggcctcgcacgaagcgcagtctcggcttccgtcggggcctgcatgctggcagcgtccctggcgccaggctgaagcaccaccccctcttaaaggggccgcggctgggactgggcagaagcagcttcgggttgcacaggctgagcgtctgcccagccccaggggtggacgaaaggcccccagtctctcatcctcccgggctctagggccctagaggtcgcagaagcccctcctgtgaccccagcccctaaatcggctccctttgcctgaggagcgcccgggacctgcccctgccctcctcgggacctcagcttcaccatcctcaaagaaagcggcctggctggagctctggggtccctcaagctcggcgcctcaggatccagggtgggctcccctgcccctctgcagagggggcccaatagccacggaaagctgggggctggagggacagtcccgagggcagcagggcgtccttggcctcaccgtctacattcgtcctgtgggagcccgggtgcgtcgctagggcccagactcctgcggcctcaccagggctgcctgggtcaccgggctccccaggaggcaggcagggaccctggggtccagcgctgcccccacctcaactccattcagcgtcagcatccgcgaggggatcctgcggactggacccagacccactccttcccggggagcgggacccgcatcggtctctgtgacacccaagggaggggccgtgctgacctctcccggggatctgggggcgaggtgggggaatctcggccacctcttgaagctcgctgagccccccaccccagagagcgctcaggagcaaaggaaaggacggagagcccacacattttctatctttcatttccgttttttcttttttcccccctccaaaatgaaagacgtgtgtagctttgtcccctgtacaccatccatttcccagggccgctgtgcggatccagcccgctggttgcctctagagtcctgggcgcccggcggtccgcatgcagcccggggcctgcccaggtgaggtctgcggccgccacagcgctgaggtcccgcttggccggggcgcacgggccgctggggatgctggctgcgaggctccggggaggtggagcgggaggttgtcccaggccctggctgcagagctcttgatgtcacgcctgacaccctccatccaccgcctcggggcagcgcttcagagccccggcagaggcaagaagtcgatcacttcgttcttcattcgttggaaaaatggaaaagcacattataatccctggaacaaccacttcagagaaagagcaaaaaattaaaataggattgtaaatgacacactgaaataagttgattttaaaaatggtagtcaatggaaaaacaggatcagaagacaggagagacagggaaaacaaataagttatctgactgaaacagaattagaaactaacaacagtaagaaatattggacatctgaaaatatgtgaaaatttaacaacccacctctaaatcattggatcaaaaaaaatcacaagataaattggaaaatattttgagctgcactccagtttgggtaacagactgagaccttgtttctaagaaaacaaaacaaacttcaaaaagctataaaattaaatgccaactttcccctttacccaaactatccgtggctctcctttgccctcagagtcaagcccatgcttctcactgtgggctccaggacctaggtggcctgaccaatgcacaccctatcacgatctcctcctctgcccacttgctcacgctgtccagtcacacacactctttatttttgcaaatgccaagctcctgatcaccgctgggcctttgccactgcagttccgcctgccaggaccagtctttccctagaccttcccattcctgcctcttcctggcttggctgcctctttctggtgcttcaggtctcagatcaaatgtcacctcttcagagaggacttcattgaaatctctgcctaacacagcccgtatcaaggtcaacacttttctctttttagacttaggttttgatataaagaagtttcataaaaatgacttgggcagctatcatctgtttaaaaggtctgactttgttgaaataatttgggctttcctgttctttgagttttgataaaacaactgtaaaaccatctgcctttttaaaaaaaattgagattgatgtatactttctgttattactatttttttacattctgtctcccaggctggaacacagttgctcgtagctcattgcagcctcaaattaccttgcctttgtaacagtaggtcctcagtcacctttctcatctacagatgttggtttacttaagctttctaattacttggaggtcagcttagctcagtggttagcacaagttgctaataaatgctcgagtatgagggtgcaaagaaaggggtagggaggtgcaagacccttggcttcaaatgcccagtcccctactcatctgctcaggcccctgtctagcctctgtatctaagccaaactacatgcctcctcccctgagaagccctcttggatttctcctgtcccgtcttccctgctctatcctcgggtgagtggatccatccatctgcctctgtgctgggcagatgccactgctctctgctttctggctggacgaggcaagggggaagttgtgtgtgtagaagtccccctaaaccttggcctttgcctcatgcctggcacattcaacctttgctgacacctccacagaaataccaacctcaccaacatctgcagaatgggccaccagggtctgtctggagcttgggtgggattttcacttgactacaaatacacacacatacaccctaggcttccaggtctgcattcttggctgactcttcacacttgagtccaagacaggtcaatggttagtggctggatttgcaagcatgtgtgtttttgggcaggatatcagctggggcagtctgagaggaagttgtcaagggaagctaaagaggagggagtcagtcacgtctctcttcacctgttgcactctctaaattttactgtccactcctaggcctgatctagagggctgtctagtctaggggagacaaagttggatgtatctactgccagccccatggggtcagaactacaggggaaggatggggactgtgggattccagaggaacaacagggagggcttcttggaggaatgctttttcttgagctgagtttttttttctctgtagctcagtctgaaatgcagtggcacaatcactgctcactgcagccttgaccttccatgctcaattgatcctcctacttcagggtgggactacaggcacatgccaccacacacagctaatttttgtattttttgtagagatggggttacatcaggttgttcaggctggtctcaaactcctgggttcaagcaatcctcctgtcttggcctctcagagtgctggaattgcaggcatgaaccacctcatctgacctgagctgagttctgaagtgtgaataggagttggctaggtgaagaagggaaaaaaggaccttctagacagaaatatttgtcaaagatagagagaagtaggcaggagctgattagggcaaggtgtttgaatgtcaggctggatgcagaaattttctcacaaggccaatgtggaaccatggagaatgtgtgagcaagggaggccatgattagagcttgatctctcaggggcagagtgggggacagcttggttcttcggtgatgggatcaggagagttccggtgtcatggggggtcaggagagttaagccctgcatcaactcatctgcacctgtcacctcgcaccagagttggtgggggacctcctgatgttctggagggccaaataagccgtgggatccagtgacttacagtgtgaggtacagaccagcacagagagggtaccgccccaggctctgctcagatggacacagccctgacctcatctccagcctcctgccatctccaccccagccctgatagtcctgctttccatggtagccatgagctgcatgttaaaatgataaatcagccccatcccttctctcctcaaaaccctctcatagctcgtctttgctcttagactaaaacccagagcctcctgcagctcagaaggcccagtgtggcccagcctctgtggcctcttgccctccccacccactccaacctcactgctgtttctctcccccttgggatccttgtacctgctgtttcttctgcatggaattcacttcctgtctcagctctaggacatcagtccagaaaggcccccaacttcctgtctctcggggtttccctgtcacgtgacctctgcactagccatagtgtccctataactaaaattgagacagattgagaaagggcttagttgagccttctatgctcaagagactcaggcccaagatcagccccagtccctgctctcatgagaccacatgcataggggtcatttgggggattatcttggcactgggtcctgtgggttggtgtcacctccagcctccagggactcatcctagccatgggaatgtgtccaattcctgcccaggattaaaattagccctggagattacatttagtaagtcaagctggaggtcaggggctggagcccacagcctgggctctgcagagctgtggcggctcagaaactcagcccagagaacatggaggtatgcttagggtcacacagtgggccacaagtgccacctgagatgtcagatacttgtgggcctgggacacctggatgatgaagggtccagcatgggctggagcagtgccagggattggggttctgagaagcatctgtggccactcccagagaatgacctgaatttcctgagagtttgttgccaggccttgtggtgggagcttggcatttcatgcctgccatagaggtctgttacctgtcccattcacagaacagcacatagaggcctagaaatcagcctcctatgctgagaaccacctcaagggtcatagaagaggctgggacccaagcataggcccatgtgactctggggagtcactcatctgaagcctcaagtcatctgtgacatggcagaggccgggaggtggagtgtattcacacggttggcagagcggggatgtcccctgggggtctcaggggcctgggatggcatgcctgctgcggaacgggcaacatgatttctttctatggaggaaccttgcatgggggtgccagagaaagccttgtccctgccgtggcccagcagcctcctgcttctgagacccccaccgggggatccaagattccttgaggtggggtccagggtttctcctgagtcaccaagtggacccctggacctaaactctggtctgagggctccaagccagagtctttccagggaatccctgtactctcccactggaacagggtgggtttccatcattctcttttcaaaaacaaaaaaaaaaaattagcagaaataattcactggtggttggggggaattggaagattgagataatcaaagagttaaaacaggctgggcgtggtggctcatgcctctaaccccagcactttgggaggctgaggcaggctgatcacctgaggttgggagttcgagaccagcctgaccaacatgtagaaacccagtctctactaaaaatacgtaattagccaggtgtggtggtgcatgcctgtagtcccaactacttgggaggctgaggcagcataattgcttgaacctgggaggtgcaggttgcagtgagccaagattgtgcctttgaactccaccctgtgggacagagagagactccatctaaaaaaaaaaattggaaaagttgttgggaatataatccacacaaaaatatcctcaatcacattagagtggccaacatgccaattcaagaaatttagagtacctttgtgaagtactatacaggacaacaatcaccaagacacagttatcagattctccaaggtcaacatgaaaataaaagccttaacggagttagaggaaagggtcaggtcactttcgaagggaactctattaggctaacagtagacctatcagcagaaaccttacaatccttaaaatcttaggagcctattttcagcatccttaaagaaaataaattccaaccaataatttcatatcctgccaaactaagcttcataaacaaagaagaaataaaatcctttcccggcaagcaaatgctaagagaatttgttaccattacactagccttacaagaggttctttaggaaaatgaaaaataaaacctgctaacataaaacacacttaaatacatagcccaaagaccatgtaaagcaactacacagttgaatctacaaaacaaccagctaacaaaacaatgacaagatacaaatctcacatatcgatattaaccttgaatgtaaatggtccaaacaccccacttaagagggacaggtggtaagttggaagactcaaccatatactgtcttcaagagacctatctaatatgtaatgccatccatgggatgaaaggaaaaggttggagaaagatctctcatacaaatgaaaaacaaaaagaccagaggttgctattgctatgtcatataaaacagactttaaaccaagaacagtaaaaaaaaaataaagggcattacataatgatgaagcatttagttcaacaagaagacataaaaatcctgaaaatataggcatccaacattagggcactctgattcataaaacaaatacttctaaacctgcaaaaagacttagacagccacacaataatagtgggggcgagttactgggtgcagcacacaaacatggcacgtgtatacatatgtaactaacctgcacgttgtgcatatgtaccctaaaatttaaagtataatttaaaaaaaatagtgctggatttgaacatcccactgacagctttagacagatcaatcattgtgatgaaaactaacaaagaaattctcttttttaaaatgtattattattatactttaagttttagggtacatgtgcacaacgtgcaggtttgttacatatgtatacctgtggcatgttggtgtgttgcacccattaacttgtcatttagcattaggtatatctcctaatgctatccctcccccctccccccaccccacaacagtccccggtgtgtgatgttccccttcctgtgtccatgtgttctcattgttcaatttccacctatgagtgagaacatgtggtgtttggttttttgtccttaacgatagtttgctgagaatgatggtttccagcttcatccatgtccctataaaggacatgaactcatcattttttatggctgcatagtattccatggtgtatatgtgccacatttccttcatccagtctatcattgttggacatttgggttggttccaagtctttgctattgtgaatagtgccacaattaacatacgtgtgcatgtgtctttatagcagcatgatttataatcctttgggtatatatccagtaatgggatggctgggtcaaatggtatttctagttctagatccctgaggaatggccatactgacttccacagtggttgaactagtttacagtcccaccaacagtgtaaaagtgttcccatttctccacatcctctccagcacctgttgtttcctgactttttaatgatcaccattctaactggtgtgagatggtgtctcattgtggttttgatttgcatttctctgatggccagtgatgatgagcattttttcatgtgttttttggctgcataaatgtcttcttttgagaagtgtctgttcatgtccttcgcccacttgttgatggggttgtttgttttttcttgtaaatttgtttgagttcattgtagattctggatattagccttttgtcagatgagtaggttgcaaaaattttctcccattctgtaggttgcttgttcactctgatggtggtttcttttgctgtgcagaagttctttagtttaattagatcccatttgtcaattttggcttttgttgccattccttttggtgttttagacatgaagtccttgcccacgcctaggtcctgaatggtattgcctaggttttcttctagggtttttatggttttaggtctaacatgtaagtctttaatccatcttgaattaatttttgtataaggtgtaaggaagggatccagtttcagctttctacatatggctagccagttttcccagcaccatttattaaatagggaatcctttctccattgcttgtttttgtcaggtttgtcaaagatcagatggttgtagatatgcggcattaattctgagggctctgttctgttccattggattatatctctgttttggtaccagtatcatgctgttttggttactgtagccttgtaatatagtttgaagtcaggtagcgtaatgcttccatctttgttcttttggcttaagattgacttggcaacgcaggcttttctttggttccatttgaactttaaagtagttttttccaattctgtgaagaaagtcattggtagcttgatggggatggcattgaatctataaattaccttgggcagtatggccattttcacgatattgattcttcctacccatgagcatggaatgttcttccatttgtttgtatcctcttttatttcattgagcagtagttcatagttctccttgaagaggtccttcacgtcccttgtaagttggattcctaggtattttattttctttgaagcaattgtgaatgggagttcactcatgatttggctcgctgtttgtctgttattggtgtataagaatgcttgtgatttttgcacattgattttgtatcctgagacgttgctgaagttgcttatcagtttaaggagattttgggctgagacgatggggttttctagatatacagtcatgtcatctacaaacagggacaatttgacttcctcttttcctaattgaatgccctttatttctttctcctgcctgattgccctggccagaacttgcaacactatgttgaataagagtggtgagagagggcatccctgtcttgtgccagttttcaaagggaatgcttccagtttttgtccattcagtatgatattggctgtgggtttgtcatagatagctcttattattttgagatacgtcccatcaataactaatttattgagagtttttagcatgaaacgttgttgaattttgtcaaaagcctttcctgcatctattgagataatcacgtggtttttttcattggttctgtatatatattggattatgtgtgttgatttgcatacgctgaaccagccttgcatcccagggatgaagccaacttgatcttggtggataagctttttgatgtgatgctggatttggtttgccagtattttattgaggatttttgcatcgatgttcatcggggatattggtctaaatttctctttttttgttgtgtctctgtcaggctttggtatcaggatgatgctggcctcataaaatgagttagggaggattccctctttttctattgattggaatagtttcagaaggaatggtaccagctcctctttgtacctctggtaaaattcggctgtgaatccatctggtcctggacattttttggttggtaggctattaattattgcctcaatttcagagcctgttattggtctattcaaggattcaagttcttccttgtttagtcttgtgagggtgtatgtgtcgaggaattatccgtttcttctagattttctagtttattgcatagaggtgtttatagtattctctgatggtagtttgtatttctgtgggatcggtggtgatatcccctttatcattttttattgtgtttatttgattcttctctctttccttctttattagtgttgctagtggtctctctattttgttgatctttgcaagaaaccagctcctggattcattgattttttgaaggctttttgtgtctctatttccttcagttctgctctgattttagttatttcttgccttctgctagcttttgaatgtgtttgctcttctttctctagttcttttaattttgatgttagggtatccattttagatctttcctgatctctcttgtgggcatttagtgctataaatttccctctacacactgctctatatgtgtcccagagattctggtatgttgtgtctttgttctctttggtttcaaagaacatctttatttctgccttcatttcattatgtacccagtagtcattcaggagcaggttgttcagtttccatgtagttgggcagttttgagtgagtttctgaatcctgagttctaatttgattgcactgttgtctgagagacagtttgttgtgatttctgttcttttacatttggtgagtagtgctttacttccaactatgtggttaatttaagtataagtgagatgggttgctgagaagaatgtatattctgttgatttggggtacagagttctatagatgtctgttaggtccccttggtgcagagctgagttcaaatcgtggatatccttgttaactttctgtctcgttgatctgtctaatgttgacaatggggtgttaaagtcacccattattattgtgtgggagtctaagtctctttgtacatctctaaggattggctttgtgaatctgtgtgctcctgtattgggtgcatatatatttaggatagttagctcttcttgttgaattgatccgtttaccattatgtaatggccttctatgtctcttttgatctttgttggcttaaagtctgtttttcctgagactaggattgcaacccctgttttttttgttttttttttgttttccatttgcttggtagatcttcctccattcctttattttgaacctatatgtgtctctgcatgtcagatgggtctcctgaatacagcacactgatgggtcttgactctttatccaatttgccagtctgtgtcttttaattggaacatttagcccatttacatttaaggttaatattgttacgtgtgaatttgatcctgtcattgtgatgttagctggttattttgcccactagttgatgcagtttcttcctagcatcgatggtcttttcaatttggcatgtttttgtagtggctggtactggttgttctttctgtgtttactgcttccttcaggagctcttgtagggcaggcctggtggtgacaaaatctctcagcatttgcttgtctataaaggattttctttctcctttacttatgaagcttagtttgactggatatgaagttctgtattgaaaattcttttcattaagaatgttgaatattggcccccactctcttctggcttgtagagtttctgctgagagatccgctgttagtctgatgggcttccctttgtgggtaacccgacctttccctctggctgtccttaaccttttttccttcatttcaaccttggtgaatctgataattctgtgtctcagggttgctcgtctcatagagtatctttgtggtgttctctgtatttcccgaatttgaatgttggcctgccttgctaagttgtggaagttttcctggataatattctgaagagtgttttccaacttagttccattctccccatcaatttcaggtacagcaatcacaagtagatttggtcttttcacatagccccatatttcttggaggctttgtccatttctttttactcttttttctctaaacatctcttctcacttcatttcattcatttgaccttcaatcactgatcccctttcttccacttgatcaaatcggcttgtgcatgcgtcacgtagttcttgtgccattgttttcacctccatttggtcatttaaggtcttctctacgccgtttattccagttagccattcatctaatcttttttcaaggtttttagcttccttgcaatggggtcgaacatcctcctttagcttggagaagtttgttattaccaaccttctgaagcctacttctgtcaactcatcaaagtcattctccatccagctttgttccattgctgtggaggagctgtgacactttggaggagaagaggtgcagtggtttttagacttttcagcttctctgctctggtttctctccatctttgtcattttatctacctttggtctttgatgatggtgacctacagatggggttttggtgtggatgtcctttttgttgatgttgatgctattgcttttgtttgttagttttccttctaacagattcctcagctgcaagtctgttggagtttgctggaggtccactccagaccctgtttgcctgggtatcactggcagaggcttcagaacagcaaatattgcagaacagcaaatgttgctgcctgatccttcctctggaagctctgtctcagaggggcacctggctgtatgaggtgtcagttgacccctactgggagatgtctctcagttaggctacttgggggtcagggacacacttgaggaggcagtctgtccattctcagagcttaaactccattctgtgggaaccactgttctcttcagggctgtcagacagggaagtttaaggctgtagaaacttctgctgtagaaagtttctgctgccttttgttcagctatgccctgcccctagaggtggagtctacagaggcaggcagtcctcgttgagttgtggtgggctccacccagttcaagcttcccagtggctttgtttacctagtcaagcctcagcaatggtggatgcccctcccccagcctgtctgctgcctcccagttcgatctcagaccgctgcactagcagtgagcaaggctccatgggtgtgtgatcctccgagccaggtgtgggatataatctcgtggtgtgccatttgctaagactgttggaaaagtgcagtattagtgtggaagtgtcccaattttccaggtaccatctgtcatggcttcccttggctaggaaagggaaatcccccaaccccttgtacttcctggatgaggtgatgccccaccctgcttcagctcaccctctccgtgggctacacccactgtccaaccagttccaggtacttcagttggaaatgcagaaatcatctgtcttctgtgttgatagtgctggaagctgtagaccagagctgttcctatttggccatcttggtgcctccccttgtttttttttttttttttttttttttctgatttcaacttgacagcagaactcaaccatgctgatggtgcagatgcatgttggtgggaacttttcattgtttgattctgacatttatgataaatggattcacttactaaagttttgtagagagagtaataaccatttaatcacctagatgatatttcctttataaaatcaaacatatctggtggttttagagcaatattttttacctcagtcacttgtgtttattagacaagaatactaagtgtcaagatgtttgcattgcctttcatatttttatttaggggacagtgtaatgataaatgactttgaatatataaccagacacaccttcatccccccaccaaatctgtgctaatttactgttttttatatttcatgcatgaagctaaattttttttacccatggattacagcaaaatgatgcaatgatacctgaatcctggccaaataacatgaaatggcaactgcaaaattgttctgcaaaattttacaaggtattatggtattgaggatatcccaagaaaacttgagaggcattatctttctcattggagactgacattcctgtatcaagtaaagtctcaggaaaaagaaccacatgtgactattttaatgcaacctcttggttgaaataaaatgactaaaagcagtgtttatcttgttgataactgagaggcaaatgttaaaaattttgttctgagatgaagagagttcacatgataagtctctgggatgtgaactaaactgggaaagcaccaggaccatttctgagacatacagttaattagggtttggataaacagaataatgttccccactccctaaaaaagatatttacatccaagttcttagatactggaaataatatattacaattcatggcaaagagaatataaggttgcaaatgggatcaaaattgctgatatgctgatgaaaaataggaagactattatgaattatcatggtgggcccagtagaatcataagcatcaaaaaccatggaagagtgaagaataaaccgtatcaaagtgatagatcatgagaaagactcaattggatatatttttaattgtttgctttagtgagtctttccactttagcatacattttattcaattcaactctgcaaatgtgattcattttatatgcctgtcactgaattgggtgttaaaaataaaatgagagaacacaaaataacaaaaattgatttctaaagatggagggcaaagggcattaagaatatagatagtgtgcaccctatacaggcatgattgtaaatgtattcattatatatagagagtaataattatatatatatgtatataattatttggcttagaaaagagtgcaggaggtacattatcaagaatttagcatcaaggttaatcaagaataagtgagtaaaataaaaataataatgatggtaataatttcaaacactgaagaaagaacattgatgatatgaagtcattttttttcagatctacaaaataggtttcttctatgccattaggatgaacacagttttcacttatgttatcttttaaaaatacctttaattgtcaagctagcattagaatctcagccaacatcttccatcttctcttccacatttttacattctttcaggatcacaggcctaagacccatgacctggtcacctgtcatttggcctttgtccacctagtaatgctcttcactgcaatggagtttttgtctccagacatgtttgagtcactgaattttcagaataactttagatgtaaagctttctttctttttttttttttttttggagacagagtctctctctgttgcccaggctggagtgcagtggcgcgatctcagctcactgcaagctccacctcccgggttcacgccccacgccattctcctgcctcagcctcccaagtggctgggactacaggcgcctgccaccacgcccggctaattttttttgtattttttagtagagacggggtttcaccgtgttagccaggatggtctcgatctcctgacctcgtgatccacccacctcggcctcccaaagtgctgggattacaggcgtgagccaccgcgcccggcctaaagctttcttctatttgcacaaggtgatgaggggcctctccatctgcaccacctgcctcctgagcatgctccaggccattaccatcagcctcagcacctcctggttggttagatttaaacataaatttacaaaatacgatatcctgggcttattcgttttttggtttagcaatttgtctttcagtagtgacatgataatctacactgtaggttattccaatgacccagataattttgaatatcagcaaatattgcacatttttcccaatgaatgtcctcatcaggacgctatttcttatgctgtcattatccagagatgccttcttcataggaatcacgctgctctcaagtgtatacatggtcattcttttgtccaggcatcagaggcactcccagcactttcacagcagcagccttatattaaggacttctctagtgaaaatggccaccaagaccatcctgatgctggtgaattcctttgtgctgatgtactcagtggacttcatcctctcatcatccacaatgctgttatgggtaattggccctgtcacctatggtgtccacaagtttgtggtcaatgcctatgccactgtcagtcctctggtgctaatcagatctgataaaagaatcatcaatattctgcaaaagtttcaatggaagtgccatctatttttaacaagttggtgataaaattttctaaaaattatttctttgtaatcaattaaattatacaaaaagcacataattttctttctgatttaaataaaacatgtgaattgtacttttataatatctcaatatcttttaattttttggtgccaagaactgtgtgctttcctcagttcaatgtccactatgattttgtattctcaaggtctgtctctcaccccttcattttaattttacctttatacaggaaaatgttattttcttcttgagtacactcttatgcggctcctattggcaagcaaatctcttagttttaatttttgaaattattttaatttttcttatttattgaagatatttagctatattcaaattctagcttgaataaaaaaatttttaagcataattttaaaatttgtttttaattgaaaataacattgtgtaagtttattatgtatgttttgaattacatatagattataaaatgattaaatctagctaattaacaaatgcatgatctaaaagttattgttttttgtggtgaaaacagttaacatcaactaccttttcatttttcaggactgcaatatatcataattaagtatggctgccgtgctgcatagcagatcttgtaaaatatatttcttctatctaataataattatgtttcctttgaccaacatctttccatcctgtcctccaccaccgcaggctctggtaaccaccattctcctctctacttctaagagataagcttgtttagattccacatttaataaattcctgtcttatttgtctctctatgtctggcttatttcacttaacataatgtccttcaggttcatctatgttgtcttaaatggcagaattttattctgccatttattttattatgccatatatttgtggccaaatagcatttcattatgtttacataccatgttgtcttatccatttattcttcgatgggcactgtgattgattccatatcttggccattgtcaatagtgctgtaataaacatgggagtgtagctatctctttaacatactgattttatttcttttggctatatgcccagtggtggaattgctggaacatacagtagttccattttaggttgagaaacttccatacttgtttttcatagtggctgtattaatttgtattcaaaccaacagtttataagagttccctttattccacatccttgctaacacttgttctcttttgtcatttcgattatggccattctacttaagataaggtaatgtctggtattgttttgatttgcatctccctggaggtgataaacaccaagacaaagaaactgggagatacaagaggacagaaatgactcagtgatagacaccatggagtctcatccacaatcggcacactctgatcctctaaccaaatgacaagccacagttcaactactccttttaaagaaaaatgagaaaacatatctctaaaatcgaggacaggcaaggagagtgtccccctttgggcaccccagctggttttatgtgtgataattatagcacctcttcttacaaacatttatgtaaagggaggattttactaaggacgaccaacatctaaggttcccaaagtgaagaactttaaatattcccaaactggtcttctcgtatgctaaattagagaagttaggtttctgcatcaaggaaaataaatgagggttgtattttagctggcacctaaaaacatccaaaagtagaaatgataaacttatttctttccagaaaggtaacaacaaaatatttgaaactacctcagaattaaagaaaagtagcaaaatcagcttctaaaatcaggaagctgccagaaactgtctcttctttttcttctcctaaacctctgctttctaaacttccttgcctggatgatttcattttttttctctttctcctccctgtattccttcttaaaccacaaagggtccagaaatagctacaggagaagataaaatagtagtcatttcttttaaaacaaaacccacaggaagagtgggttcaaacataagatatacaccttacaccaagtcagaattaagtgctctgatgtttggatttcctgatctgactcaagacaccttaggtttgccaaggaattccaaataatgcttaagacctatgattcagggttttcaaaccaatatcagctaactgatttactagtcctccaaaacaaagccaaagagtgctacaaagtagtgaattagaaacagctttagcagattttaacaaactaaagtgcaaatgggagagagaagtgtagggagttttgcaactgcctctgtgggaatttaccacagctattccccctaatcctacagactaggcaaaatacaacaatgtaatatataccccagcaaaaccatacctgattattatatcacatttatttttattttttgtgggtatacagtagttgtgtgtataaatggggtatatgagatactttgatacaggcatgcaacatgtaacaatcacagcatggtaaatggggtatccatctcctcaagcatttactctgtattacaaaaattgaattatatgatttcagttattttaaaaggtacaactaaattattattgattataataattgtcaattattgacaattgcagtgttgtggtatcaagtactactgttgtgctaccagtacaaactgtgttatcagtacaaatactactgttgtgctatcagcacaaataccctgttgtgcaatcaaatagtacctctacctcttattcattctttttaactatttcttgtacccattagccatcctcacttccctccatggccctaccaaactgcccccctactatgcttctcagcctctggtaaccatccttctactctctatctccgttgaattcaactcaatgggatccttagcgcccataaataaatgagaacatgcaaagtttgtctttctgtgcctggcttatttcatttaacataataaccctcatccatgttgttaaaaatgacagaatctcattctttttttctggctccactgtgtatacatactacattttctttatccattcatctgttgattgacacttacgttgcttccaaatcttggctattttcaacaatgctgcaacaaacatgggaatgtagacatctcttcaacatactgagttcctttcttgtgagtatatacttagcagtgaaattgctggattatatggaagctctagtttagttttatgaggaacctccaagctgttttccatagtggttgtactaatttacatttccaccaacagtgtaccaggcttcccatttctccacattctcactagcatttgctgttgcctgacttttggacaaaattcattttaactgggataagatgatatctcattgtagttttgatttgcatgtttctgataatataactgcttgcaattcatatgccttcttttaagaaatgtttattgaaatattttgcccattttaaagatcagattactagatttttttcctatacagtagtttgagctgcttatctgttctagttattaatcttttgtcaggtgaatagtttgcaaatatgttctcctattctgtgggttgtctcctcactttattgatcatttcctttgacatgcagaagatttttaacttgatgtaacttcatttgtccatatttgctttggttgcctgtgcttgtggggtattactcaagacatttttgccaagacctggagagactttccccaatgttttcttgcagtagttttttaattcgaggtcttagatttaagtatttaatccgttttgattcgacttttgtatatggcaagagttggggttataatttcattcttttgcatgtagatatccagtttccaagcatgatttattgaagagattgtcttttccctaatttaagttcttggcacctttgttgaaaatgagttcagtgaaaatgtgtaaaatttttttctgggttatctgttcaattccattggtttatgtgtctatttttatgccagtaccaggctgctacagttactatagctttgtaatataatttgaagtcagttaatgtgattcctgcatttaatctgtgaattgctttgggtaatatagacattttaatatactaacactatcaatccatgaacatggaatatctttcaatttttgtgtcttcaatttatcttatgattgtgttatagtttttgttgtagaaatcctttacttctttggttgatttctatgtatttagttctatttgtggctatgataaatggtatttctttttaaattctttttcagattgttcactcttggcatatagaaatgttactgattcctgccgggcgcggtggctcacgcctgtaatcccaggactttgggaaggtgaggtgggcagatcacgaggtcaggagatcaagaccatactggctaacacgatgaaaccccgtctctactaaaaatacaaaaaaagttagccaggcgtgatggtgggtgcctgtagccccagctcctcgggaggctgaggcaggagaatggtgtgaacccaggaggcagagcttgcagtgagccaagattgcaccactgcactccagcctgggagacaaagtgagactctgtctcaaaaaaaaaaaaaaaaagatactgatttttatatattgatttgtatcctgaaactctactgaatttatcagttctagtagtttttgtggagtcttcaggttttttacaaatataagattatatcatctgcaaaacaaagataatttgtcttcttccctttagatgccctttatttctctctcttgtctgattgcttttgctaggacttccagtactatggagaataacagtggtgaaagtgggcatcctggtcatgttccagatcttagagaaggggatttcagtgtttcccttgtcagtatgatactagctgtgggtatgtcatatatggctttcattatgttaataatgttctttctctacccaggtttctgagggtttttaatcatgatgggatgttgaattttatcaaatgcttttttaaaatgtcttaatttaaatgattatataatcttttccttcattttggtgatgtgatgtatcatttggattgatttgcaaccattcttgcatccttgtgataaatcacacatgatcatgaagaatgatatttttaatatattgcttaaaggtttgctagcattttgttgaggatttttgcatcaatattaattggagatattgtagttttctttttttaaagtgtctttgattttggtataaaggtaattctggtgttatagaatgagtttggaagtattccccatctgtattttgtggaatagtttcagtaggattggtgttagttctttaaatatttgttagaattcagtagtgaagccatagaatattggggcttttcttttctgggagactttttattacagctttgttctcattatttgttattggtctgttcatgttttgtatttctttgtgtttcaattttggtgtgtttcttggccctagtctggtccactcagacctgctccatgctcaccatcaggcagctggtggtcctttttgaggagtgagtgcagcagggaccagtggttgggctgaagccccttcacctcatgcggactctccaatactcattgaacttcatggtgagggacagaggacccaccctggctctcagcgggagagcagggaattcttgttcaaggaagcccctggggcagccgcagaggcagcccttgggaaaaagcgcccaaggcccccctcaaccggccatcctgcctcctctgcaggaccttctcttcccctctttccctccctcctgaggtgaaaaggaggggaggagaccacggagccctctgtgtcagggaaacctggcccttccttttgagcgttcaggggactcgcatgggccttgccccttctccaggacctggaagcttctctctctgaagagccctgagttccagtctcaagtgtctcattccccattgcctcctgcttctcctttcatcccccccaccaccacctggggctcacactccctgcctttgggcttcaaatgttgtactacgtgcttgacccactagcctgcttaatcttcaaaatcactctatcaaaaagacattttaggctgggcattgtggctgaagcctgtaatcccagcactttgggagacccagatgggctgattacttgagtgtatgagttacagaccagcctgggaaacataacaagatcctgtctctacaaaaatagaaaaaaattagtggagtgctgtggcacatgtctgtaatcccaactacttgggaggctgaggtgggaagattgcttgagtctgggatgtcgaggctgcagtgagctgagatcacgtcactgcactccagcctgggtaacagactgagaccctgtctcaaaataaaaataaaaataatttaaaaagcgaaattgccaaaatcattcatttaaccaataagatgagcacctacctatcagggacaataaaagtttaaaggtgccaacaattatgaaggcagtattgaatttacttgaaatatgaagaacaccacattgggtgaacttagataggaaggccaaggagatattcctaggaatatcattatatatggaaaacactgaaaaaagacactgcagtgtttgagaaaataatggccatagaaagagatttcatggaccttccagcttatgaaaaaatcaactgaaattgctcgacattaggttagaacattaaaaaggaaaataagccattatagaaggagagaattggaataggggacaggaatgacccatttcccagtctctgcctagaacagggctggggaaaaatctgtggtcatcacattcaccattgcataaacacatattctttctatatgtcagcaaggagcaagtgctaccaagacaaggcaaggaaaaggaatagagaatattgctgggtgcttttctgtagggtgatcaggaaaggcctcactgaaaaagagacattagagcagagcaagtgacagagagagagtcatagagagatctgtgggaagagcattccacgtgagggcaacagacactgcaaaggccctgaggcagggagtgcttggcatgtctgaggagccagaaaaaggccagtggggctggaatggagtgagtgagaagtaataggtgcagaacacacatggccttagagatcatggctctaggtgttttgttttattttccaatttttaaaattgtgttaaaatacacataacataagcgtctgggatcccgcaggatgctggccccaaacaggccaatttgtcctgtctctgtgggatttgttggttctagaagatcagatttggtctgggtcacccaaatctgtctgtaccccaacctccactgtctgctcttacctccctaggtgttggctcaggtactgggcaaactttaccaggaatatatacattgtgtggaatttcttagcttccatttcaacaaagttgaaacttcggggaaatgatttgccaagggttacaacttggggaaaatgatgatagtttgctttacaaattgctctagttaaccaataaaagtatggcatgcctacccaggtacagtggaattcgaggtaaacagcagaacagatgcatgctcaggtacatttgagttggagataaacagcaaaacagatgcgtgctcaggtacacttgaattcgaggtgaacagcagtatgcatgcgtgcccagctacacttgaattcgagataaacagcagaaaagatgcgtgcccatgtacacttgaatttgagataaacagcagtatggatgcatgctcaggtacacttgaattcaaggtgaacggcagcacgatgtgtgcccagctacacttgagttcgaggtaaacatcagcacgatgcatgcccagatacacttgaattcgagataaacagcagaacagatgcgtgctcaggtacacttgatttcaaggtgaacagcagcacgaggcatgcccagataacacttgaattcgagataaacaggagaacagatgtgtgctcagctacacttgaattcgaggtgaacagcagtatgcatgcatgcccagatacacttgaattcaaagtaaacagcagcccaggtacgcttgaattcaaggttaacagctgtatgcatgtgtgcccagctacacttgaatttgagatcaacagcaatattgaattttctaccaaaaatgcatatgctctgtctctgaataaatgtgcaagaaatgaaagttctacatgcccaacaactctttgcttccatttccttacggtcatgaagccacacctgcctggagctactaatctatttcctgagcatcagaaccctcttgctcatttggggaatccatctccctgcagttgacctgtggacctccagcatccctgggcagcctgaggaccctaaaccctgtagttcagtttatgacacgcaggcttggaggaatttccctccataaggctgctgtgaactcccacgccaggagaaattaaaatttgtaatacagcggagatctctgaatgagcttttctccctgatacatgtcagcgaactcagtgtgtctttggaaatccggaaacctccttttctcagttcaggctgcctgcatcatgctggtttgcttcctgcaacaaaacagatcatccagacacctctctgttttccttcggatattccccacactaccacgccattcgtgggcaggacctcagtgcctgaggtcagaatagagacacctctgacatcccatggctgtacccacaaataacccttcctcggcagtcgctgaagccacacctctacacagctgtctgttgtcttacagtggcataagcataaaacagatttttttttgacatgtattatagcacctgctggctttatttccctcccttataccataatattgcttgttgatttgtatcaacggatttgcatcttctgcccgccacacacacacacacacacacacacacagacacatccaccccactccccccactagtgactaggtacacttgaattcgaagtaaatagcacacacaagagatatgtccagcacgtgattttcacaggcctgatttcacagcggtgctggaggcaaacctcgcagcctctagcctgtgcagaccgcatcatgacaaattgtataaatatgtgcaaattgtccagatgatgtcatgtgtgccccagcctgctctccaagtgggcagaacgcttcagggaaggtcagggcaggccttgctctgaattcaattgaggtaattgcattcaatttgcttaaatgtatcacagagaaaagccctgtctgttgatctcaatcgtattaagaagtttattttccgccagggccggactccacggcctcacggagaggaagccttctctcggttatgtccttctttctcctgcttgattccaggtcctgggggcagccctgggaatgccagagagggccccccgcccccgccacaagaaataccttatggctctctccctagccacctgcagggctcggaatggccgcaaataagcatgaggatttctgtgcttagggaatagtttgtcagctctttgcaggtgtgatttgacgatgccagtgagtgaacagagcctgaggtttcaccccaaaagatcgttctgtggtttgcctaccatgattcaacagcccaggatctgctcgggcacagacaacctgaagtgtaaagaggctcctgagagccgggtcccagctcggccccagacaccccctctgcaccgaccccacgagcccccaaaagtcatctctaccagaggttctcctcatttctgagaagagggaagcagggcccatgcgttttgaggttgcctctggctccaacgcggtgacacgcaatgccagcctcatgagggtgagagtcctctgaatggcccacgctctcttgtgacaatgacacttgtctgtgaaggagaaggccaagctgactcacacgctgagtgccccaaggatgaagggggtccccggagtgggtaccgcacctccctctttgcagacaaggagggggcggctctgagacccacagggatgtaccagagagtgcgtgttaggcagaaccgaacatccccaggaagggagggaaaagcaggtggctgatatctgcagggtcctcttgtacctgaaactccaaaactttacactattttcagaataacagcagcagcagatacaaaagaactcatgagggttatgtcttataaaataacagaaaatatcttaggcagactggggagtttctgtctatctattacccatctatcatctatcgacctattgatctatttatatataatctatctaacatctatcatctatctatcaatcatctatcatctactatatatccatcatctatcatccatccatccatctatccatctatatatgtatttatctattgaatctataatctatgtatcaattgtatatctacctatcatctatccctgtagctatctatcgacttacctatctacctatctatccatctaatgtattatgtaatctatgtatttatctattgaatctataatctatgtatcaattatctatctacctatcatctatccctgtagctatctctctatccagctatctatctatacatctatctatccatccatctaatgtattatctatctatgtatttatctattgaatctataacctatgtatcaactatctacctatcatctatctgtctggctagctagctgtctatctacctatcatctctctactatctatctatcatctactatatatccatcatctatcatccatccatctatgcatccatccatctatccatctatatatgtatttatctattgaatctataacgtatgtatcaattatctacctatcatctatccctgtagctatcaacttacctatctacctatctaatgtattatctaatctatgtatttctctattgaatctataatctatgtatcaattatctacttatcatctaactgtttggctagctagccgtctatctacctatcatctctctactatcatctactatatatccatcatgtatctatcatccatccatctatgcatccatccatctatccatgtatctatatatgtatttatctattgaatctataatctgtgtatcaattatctatctacctatcttctatcccagtagctatctatcaacttacctacctatctatctaatgtattatctaatctatgtatttatctattgaatctataatctatgtatcaattatctacctatcatctatctgtctggctagctagccatctatctacctatcatctctctactatctatctatcatctactatatatccatcctctatcatccatccatcaatctatccatctatctatatatgtatttatgtattgaatctataacctatgtatcaattatctatcacctatccctgtagctatctacctacctacctattgatctatctatccatctaatgtattatctatttatctattgaatctataatctatgtatcaattatctacctatcatctatccgtctagctagctgtctacctatcatctccctagtatctatcgtctactatatatccatcatctatctattatccatccatctatccatctatctatatatgcacttatctattgaatctgtaacctatgtatcaattatctatctacctatcatctatccctgtagccatctatccacctatctatctaatgcattatctgttgaatctataatctatgtatcacttatctacctatcatctctccatctagctagctagctgtctatccacctaccatctctctactatctatagtctactatatatccatcatctatctattatccatccatctatccatctatctatatatgtatttatctattgaatctataatctatgtatcaattatccctctacctatcatctatccgcctagctagctagctgtctatctatctacctatcagctctctactatttatcatctactatatatccatcctctattatccatccatttatctatatatttatgtatcaaatctataatctatgtatcagttgtctacctatcatctatccctgtatctatttgcctatcatccctccattatctgcctatctagctctctatcatctatgcatctatccagttatctctctatatatctgtcatatatttatctacctatctctatcatttatgtaatttaactcacctattcctatgtattaataatatatctgttatctatctatcatttatgtatttacctaggtctatcatttaattgtcctaatttatgtcttttctattaattatatacctaccatctatctcgttctaacagttatctatttctatctagtttaacctatttagtttatttctttccatctgtaatagaatatgtctattgtctatctatatatccttttttgctttttttgagacagtattattctgccacccaagctggaatgcagtggcacgatctcagctcactgcaacctccacctcccgggttcaagtgattctcttgcctcagcctcccgagtagctgggactacaggcccagtcaattttttacagaccaccacgcccagccaatttttgtatttttagtagagacgggttttcatcatgttgtccaggcttgtctcaaactcctgacctcaggtgatctgcccgcctcggcctcccaaagtgctgggattagtggcgtgagccaccgcgcccagtctgtctatatacctttctctctctctctctccacacacacacgcacacacataattgtgtttgtaagcatctggagaatacgtctaatcatctaatctcccatttcaatttgggatccattacttccacagtcaacactatccaattagcaatagccacttaaacacttcaggcatcttggaatgtctgtttttctaagccaagatctaaaaccttggatgtcagattttccagatctcctgttttggggactggtgtgaaaacgtcattcgatgacaggccgacccaggtggcccctgccttaacatcaaacgccatcaaactctccgaacacgcttctggctccaggcaggtgccgtttttctccccacagaaaggtcagctagagtcacccttaaaataatgcacttgtatattttttattgtgtggacaagaaattgggaacaggttcaggctgctcagaaaaacgtgttaagtttatttttgaacagaggtttattaaaaaaaaaaaaagccaaggaaagtcatgcatggttttgagcttctgcctcgcagtacctggtagatgctggtgttgcaaagtggacacagcaatttgatcccttccctgggtcaccagggaaacctgtgccccacacttgtctcagctgcagatgtgtaaaagtggctgagatggtttcttctagaagtgagttaaaaaggactgtaaggggccgggcgcggtggctcatgcctgtaatcccagccctttgggaggccgaggcggacggatcacaaggtcaggagatagagaccatcctggctaacagggtgaagccccatctctactaaaatactaaaaaaaaaaaaaaaaaaaaatagccaggcgtggtggcgggcacctatagtcccagctactcaggaggctgaggcaggagaatggagtgaatccgggaggcggaggttgcagtcagccaagatcgtgccactgcactccagcctgggcgacagagcgagactccgtctcaaaaaaaggaattaaaaagaaggaaaaaaaagggcgacacagtggctcacgcctgtaatcccagcactttgggaggccgaggcgggcagatcatgaggtcaggagatcgagaccatcctgactaacacagtgaaaccctgtctctgctaaaatacaaaaaaacattaggcgggcgtggtggtgggagcctgtagtcccagctattcaggaggctgaggcaggagaatggcatgaacccaggaggtggaggttgcagtgagccgagatcgcgccactgcactccagcctgggcgacagagcaagactccatctcacaaaaaaaaaaaaaaaaaaggactgtaaaaccacttgtcctaaccatgctggtttgtggatcttgttgatccctgggagacccagtgtggggctgtgactcacaaacttccctaatgtggggccttgagtgtataatcaacactctcgcgtctgaagttaactgggatgctggtttcctgcagacaccttccagggagaaaaagccgagatgctgctggctgcatgggtcccccatggagtcacttaagaaaagcaaagaggccaggtgcggtgactcacacctgtcatcccagcattttgggaggctgaggcgggcacatcaccagaggtcagaagttcaagaccagcctgaccaatgtggtgaaacccgtctctactaaaaatacaaaaattagccaggcgtggtggtgggcgcctgtagtcccagctactcaggaggctgaggcaggagactagcttgaacctgggaggcagaggttgcagtgagccgagatcatgccactgcactccagcctgggcaacagagtgagactttgtctcaaaaaaataaataaatacatacataaaaaataaataaaaattaaaataaaaaaagaggagctgcacagtggctcaggactgtaatcccaggactttgggaggcagaggcagacagattgcctaagctcagaagttcgagaccagcctgaccaacgtagtgaaaccctgtctctactaaaaatacaaaaattagccgggcgtagtggcaagtgcctgtaatcctagctactgggaggctgaggcaggagaattgcttgaacccaggaggtggaggttgcagtgagccgagatcatgccaatgcactcaagcctgggcaacagagcaagacttcgtctcaaaataataataataaataaatacataaaaaataaataaaaattaaattaaaactaaaaaaaaaagaggggcagcacagtggctcaggcctgtaatcccaggactttgggagttggaggaagcaagattgcctgagctcatgagtttgagaccagcctgggcaacatgatgaaccccctgtctctataaaaagtacaaaagtgagctgggcatggtggtgcatgcgtgtagtcctagctacctgggaggctgaggtgggaagatcgtttgagcccagtagacagaggttgtagtaagctgagatgataccacttcactccagcctgggtgatatagccagaccttgtgtcaaaaaaataaaaaacaaaaacaaaataacataacataacatgaattaaaaaaggggtgatcaggccatggtggcatctttctcatgaatgggcttaaggtccttaggaaagaggcttcctggccggacacggtggctcatgcctgtaatcccagcattttgggaggctgaggcgggtggatcatgaggtcaggagttcaagatcagcctggccaacatggtgaaaccccgtctctgctaaaaatacaaaaattagccgggtgtggtggcaggcacctgtaatcccagctactcaggaggctgaggcagaagaattgtttcaacccgggaggtggaggttgcagtgagccaaggtcacaccactgtgctccagcctgggcgatagagcaagactccttctcgaaaaaaagagagtaagaaagaaagaaaaagaaagaaagagagagagagagagagagaaagaaagaaagaaagaaagaaagaaagaaagaaagaaagaaagaaagaaagagacaggcttcctgtaacattcagttcccttggccttccacctttaccatgtaaggacaaggtgtgtcttccttctggaagatttagcaggaaggtgccatcttggaggcagagaacagcactcatcagatatagaatctgctggtgccttggtcttcatgtaaggacaaggtgtttcttccttctggaatattcatcaggaaggcgccatcttggagtcaaagaacagccctcatcagatatggaatctgctggtgccttgatcttcatgtaaagacaatgtgtttcttccttctggaagattcatcaggaaggtgccatcttggaggcaaagaacagccctcatcagatatggaatcttctggtgccttggtcttcatgtaaggacaaggggtttcttccttctggaagattcagcaggaatgtgccatcttggagtcaaagaacagccctcatcagatatggaatctgctggtgcctccatcttggacttctcctcctccagaaccaggagtaaataagtctctgctctttataaaccacacagtcttagggactctgttctagcagtgaaaacaaatccaggcagatgcagatacatgatttacgtgggctcaatggctaatagagatgacgttcacctggaaactccacagatgggaccttgactagctaagtctaggctgactggagagttcctatctgtctattacctatctatcatctatcaatcaattgatctatctactatctatctatctatatatctaacatctatcatctttttatcaatcatctatcatttatctatatattcatctatcatctacctatcatcaatctatcatctatgtatctaacatctatcatctatcaatcatctatcaactatcaatcatctatcaatcatctatcaactatcaatcatctatcatctatctatatattcatcatctatcatctatcaatcatctatgtatctatctatccacctacctatcaatagatattgatagataggtaggtggatagataaacagccctgatgagggctcttctttgcctccaagatggcaccttcctgatgaatcttccagaagaaacaccttgtctttacatgaagaccacctatctatctatctatctatgtctgtgtctatccattcatccatctatccattcatctatttagtgtattctctgtgtatttatctattgaatctacaatctatgtatcaattatctatctgtcatctatctatctgtctagctagctgtctatctgcctatcctctctctactaccaggagttcatcggtgggtcttgattctctcatgtggtaagtatcatcacagcttagaatctcacgtcttcaccatcacctcctctctgtcctatataattagttccaagggtcttaattaggcacttatgtaacccagcactgcttattgcaaaagttgaatctccaatgaaaggttcttagcctccatggagatcctgagattctctgcttggctgttcccaacttccatgtcaacctggggcttggggcaaccccttctccatctggcatcttgcctcctccttggtggcctgggccaagactctgttctccctgcctacccgagtctccataagcaaggttgcactgctcatttagacctcagatctgtggagctgactgagtttctgcatgccttagaagatgagctttgaggctgggcgccggtgccttacatctgtaatcccagcactttgggaggccgaagcaggtggatcgcctgaggtcaggagttcaacaccagcctggccaacatggtgaaaccccatctttactaaagatacaaaaaattagccgggggtggtggcaggtgcctgtaatcccagctactcgggaggctgaggcaggagaactgcttgaacccgggaggcggagcttgcggtgagctgagatcacgccattgcactccagcctgggcgacagagcgagtctccatctcaaaaaaaaaaaaaaaagaagaagaagaagatgagctttgaaggattcatggaaaactgtaaaagctgcaatgcttgatcgcatttacagacgcttttcctttgcaggcttaacctttgtttgggtaaacacgctaattgttttaaacatgatttgaaaagtctgttttgcttcacgaatgttgaggaatgaatccaagggctgaggtttgccaaactcctcaggaaaccatcgaccctgggttatcgctgtgacagtttggaatcccggaacccacaggaactccaagcacctgtcaccctcctcaccggtgcccattgaggagggtggcaaggtgctccaatgaccatcacaggtggcatctcactttcatcttagtgggctgccgagggtagtggcatccttgtaaatcctagcactttctatgaaacgctaaaagttaagagtttggggaccggggacagcatggctgaacaactcttaattttatgtatatatgtatgtatgtattggagatggagtctcactctgtctcccaggctggagtgcagtggcacaatctcggctcactgcaacctctgcctcccaggttcaggtgattctcatgccttaacctcctgagtagctgtgactacaggcaccaccaccatgcctggctaattttggtatttttagtagagataggttttcaccgtgttggtcagcctcgtcttgaactcctgaccccaggtgatatgtctgccttggcctcccaaagtgttgggatgacaggtgtgagccactgtgctcggccaacccttgaatttaggctcagaagttgccatttcctctgttttgcaacttattctctgaatactcactgaaaaatcacccaccttctagaaagttctgatgtctcttctgtaaaatgcctgcctctcattgtctgagggtcaagctgcattttaaaacaaaagcactatgtaaaaattgaatatttctctccataaaataaaggtagaaggatcactggagcccaggagtttgagaccagcctgggcaatacagtgaggccccatctctccaaaattttttttcttttttttgagacggagtcttgctctgtcacccaggctggagggcagtggcgtgatctcagctcactgcaagctccacctctcgggtttatgccattctcctgcctcagcctccccagtagctgggactacagctgtccaccaccacacccggctaattgtatttttaggagagacggggtcccaccgtgttagccaagatggtctcgaactcctgaccccgtgatccgcccacctcggcctcccaaactgctgtgattacaggcgtgagccactgtgcccggccccgattttttttttaatgaatgggacatggtggtgtgttcctgtggtcccagccacttgggaggctgagatgagagggttgcttgagcccaggagtttgagaccagcctgggcaacatagcaagaccccatctctgcaattttttttttaaattaatggtgcatggtggtgctctgggaaacatagtgagaccccctctctccaaaacatgtttaaaaattaacagggcatggtggcacgctcctgtggtcccagctacttgggaggctgaggtgggaggatggcttgagtccagcagcgtgaggttgcagtgagctatgattgctccattgcactccagtctgggtgacggagcaagattgtctctcaagaaaagaaagagagaaacagctgtggacaaaggcagaatgcccctctgcaaagacaaagtcaagggatggggtcacggtgaggcagatggagaggaagacaggagagatccttcccactgtgggtggctggtgcttcctcctctcctccctccctgactccagctccccacctccctgatttttggagaactcgacaatgagttgccaaaatgacatcttcctcaactctggcactgaccttccgcaaaaccaccagtgtcatcccttttcttccaaaagatgccctggaattggaacagagagaaaatatcttccaggagagctgtctctctctgtgtctctctcccccctctctctcccctgtctctctctctctgtctctctctctcctctctgtctctctctcccctctctctctctcccctttctgtctctctcctctctctctctctctccctgtctctgtctctctctctcctccctctctcccgtctctctctcccctatctctctgtctgtgtctctctctctctcccctccctctcccgtctctctctctcccctccctctcccgtctctctctctcccccctctgtctctctctctcccccctctgtctctctcccccctctcccctctgtctctttctctcccccctttctctctctcccctctctctttccccctctgtctccctctctccccccatctctctctctctcccctctctgtctctctctctctctcttccctgtctctatatctctgcccccctctctctcccctctctgtctctctctcttccctgtctctatctctctcccccactctctctctctcccctgtctctctctctctctctctctctctctctctctctctccaaccagagcagctgtggggccgcccgtcacaagaggccacataacttcccttcatcagtttccagcaatcagctgggaaaattgtcccatatgtgggagtgccaagcggggtgcagggttagggctgggacacaggccacagcgaggttactgtctggctgcaattacgtgcatgctgcaggaatccgggggtgccttggggagctgttgcactccggttctttataattgcacgctcggaaattactcaccctgcaacgtcttggggccttcccagttcagcctctgcccacatgttccccgaggaggaacagcctagtcttggcgggtttggaatctccactgtgtttattaattatttattgttatttatttatttttgagacggagtctcattctcttgcccaggctgtagtgcagtggcgcgatctcggctcactgcaacctccacctcccaggttcaagccattctcctgcctcagcctcccaagtagctgggactacaggcacgtgccaccacaccaggctaattttttgtatttttttttttagtggagatggggtttcaccatgttagccaggatggtctcgatctcctgaactcgtgatccatctgcctcggcctcccaaagtgctgggatgacaggcgtaagccaccatacctggcctatttattcatttttgagatggagtctcactttctcgcccaagctggagtgcagtggcacaatctcggctcagtgcaagctccacctcctgggttcaagcaattctcctgcctcagcctcctgagtagctgggttgacaggcacctgccaccacgcccggctaatattttgtatttgtttttttagtagagatggggtttcaccatgttggccaggtcggtcttgatctcctgacctcgtgatacacccacctcggactcccaaagtgctgggattacaggtgtgagccactgcacctggcctatttatttatttttgagatggagtcttggtctctcacccaggctggagtgcagtggcacgatcttggctcagtgcaacctccgcctcccgggttcaagcgattctcctgcctcagcctcctgagtagctgggttgacgggcaccagccaccacgccaggctaatttttgtatttttaatagagatgaagtttccccatgttggccaggctgttctcgaactactgacctcaagtgatctgcccacctcggcctcccaaagtgctgggattacaggcgtgagccaccacgcccggcccaatctgtggtttttttggggcttgccttttttcacagaatgctatcttttcagattcatgaacattgtagcctgtctcagagcttcactcctttactgtttttattttattttattttacatttatttatttcttcacttatttatcttttgagatgaagccttgctgtcaccaggctggactgcagtggtgcgatctgggctcactgcaacctccgcctcccaggttcaagtgattctcctgcctcggcctcccgagtagctggggtcacaggcacccaccaccacgccaggctaatttttgtattttcagtagagacggggtttcaccatgttggttaggctggtcttgaactcctgacctcagatgatccacccgccttgggctctcaaagtgctgggattacaggagtgagctacctcgcccggcccttcgttgtgctgggttttaaaatcatcccaaagagaccctgtgggccagttatagagacagtggctggtgctttttgagggggattctgctatttaaaagtccagagggtaccctgagggcagatcacctgaggtcatgagttcgagaccagcctggcctacatggtgaaaccccttctctacgaaaaatataaaaattagccgggcgcggtggtggacgcctgtcatcccggctacttgggaggctgaggcaggagaatcgcttgaacccaggaggcggaggttgcactgagccgagatcgctccactgcactccagcctaggcgagagagcaagactctgtctcaaaaatcaataaataggccaggcgccagtggctcacgcctgtcatcccagcactttgggaggctgaggcgggtggatcacgaagtcaggagatcgagaccatcctggctaacacggtgaaacctcatctctattaaaaaaatacaaaaaattagccgggagtggtggcaggtgcctgtcaatccagctactcgggaggctgaggcaggagaatcacttgaacccatgaggcggaggttgcagtgagccgagatcgtgccactgcactccagcctgggcgacagagcgagacttagacacacacacgcatacacacacaggagacttagacacacacacacacacacgtcctgaggatatttcttcccacggaatgctacctgttcatttctgcgcgtcttgtgcccttaaagtaaaggtggtgtcttatcctcagctgtctctgtgcacagggccagaggaaggagtcttgagtttcttggaaacagtacctggctgtagtgcggcttaatctctgtctcttgagctgaccagccaggttaatttgccccaagtcacattggaaaaatctgggcctctctgctcagcaaactgggagagaaaaattacaaccagattgggtgcgctcattactccgacggcaaacactgaaaaaaatgtcttaggttatttatttatctcgttattgacgtattggtgtgaattacatcactgaagtactttgaaatatgtagctttgccatggaataggctataaggaagaaagaaatcatgtcctttgtggcaacctggatgcagctggagaatattatcctaagatcattatcacaggaacacagaaacaaatcttgcatgttctcaacttataagtgggagctaagtgttggatatacgtggatataaacatgggaacaacagaaactgggagactagcagaagagagggagggagggaggaagggagggaggctatggttgaaaacctcaaatagccacgaagccttattgagcaaatgcaaagtgtctggcgtgtttggccgggtgaggtggctcacacctgtaatcccagcactttaagaggctgtagcaggtggaaggtttgagcccaagagcttgagaccggcaacatggcaagacgtcatctttacaatttttttttttttaattagctaggtgtgctggtgcacacctgtaatcccagctacttgggaagctgaggggtgaggattgctcgaacacgggagccggaggttgcagtgagctgagattccaccactgcactccagcctgggcaacaaagtgagagtctgtctcaaaaaaaaaaaaacaaaaaagaagaagaagaaagaaagaaaacaaaaaagaagaagaagaaagaaagaaaaaaaagaaaagaaaggcaaggcagggcagggcagggcaacctcctggttactatgctcagtatcagggtgaggggatcacttgtaccccaaacccgaacatcagacaatattcccatgtaacaaacctcctactcaggagaccgaggcaggagaatcgcttgaacctgggaggcgggagatcacaccactgtactccagcctgggtgacaagagagagattttgcctcaaaaaataaataaataaataaatcaaattccaaattattatatacaaatatatatgcagctttccaaggacaaatggactgttctaaaaaaaaaaaaaaaaaaggccaccacggtgggtgatgcctgtaatcccagcactttgggttgggaggccaaggcaggtggatcacgaggtcaggagatcaagaccatcctggctaacatggtgaaaccccatctctactgaaaaaaagatacaaaaaaattatctgggcgttgttgcagatgcctgtcaacccagctactcaggaggctgaggcaggagaatcgcttgaacctgggagatggaggttgccgtgagccgagatcacaccactgcactccagcctggtcgacaagagtgagattttgtctcaaaaaataaataaataaataaatgaaattccaacattattatatacaaatatatatgaagctttccagggacaaatggactgttctaaaaaagaaaaaaaatgccgggtacagtggctcacgcctgtcatcccagcactttgggaggcagaggcgggtggatcacgaggtcaggagatcgagactatcctggctaacacggtgaaactccatctctactaaaaatacaaaaaattagccggtcgtggtggcgggtgcctgtagtcccagctactcgggaggctgaggcaggagaatggtgtgaacccggggggcggatgttgcagtgagctgagatcgcactactgtactccagcctgggtgatagagcaagactccgtctcgggggaaaaaaaaaaaggcttaagtgttaatcaacaacaatgcttaagtgttaaacaacaacaacaaaaaaggaaaccattagaggactctgtcagtgattcatggagactggcttggcgaatgccgttgaaaagaagggccgtcctcccagactccgggtgatagacaggtggacgcctaagaggaaagcatttattttccatgtttaaatcgttattaaacaagacacatactgcaaaacatttattggaagggagcaacgtgaaccagccatgggctgcctgaagagccccagatgtaaaccattacattatctgaggattaaagtgtgttcacatttccagttttgcccatcaggaaggcatgtgatttgaaagtgtaattggccgatgtcatttttgggggaacgcacagcgtgctgtggacgtattaacttactggaaagaatttatggggcatgtggcctccttgcaggattctgggacatggggtgaagtccccactatcaattggcacccacaggtgtgtggataccccacccaccagaggctccagcatgatttacccaccagaggctccagcatgatttacccaccagaggctccagcatgatttacccaccagaggctctagcatgatttacccaccagaagcttcagcatgatttacccaccagaggctccaacataatttacccaccagaagctccagcatgatttacccaccagaggttccagcatgatttacccaccagaagcttcagcatgatttacccaccagaagcttcagcatgatccacccaccagaggttccaacatggtccacccaccagaagctccagcataatttacccaccagaagctccaccatggtccacccaccagaagctccaccatggtccacccaccagaagctccagcatggtccacccatcagaagctccagcataatttacctccaagaagctcccaccatggtctactcaccagaagctccaccatggtccacccaccagaagctccagcatggtccatccaccagaagctcgagcatgatccacccaccagaagctccagcatgatccacccaccagaagctccagcatgatttacccatgagaagctccagcatggtccacccaccagaagctccagcatgatttacccacgagaagctccagcataatttatccaccagaagctccaccgtggtctactcaccagaagctccagcatgatttacccaccagaagttgcagcatgatttacccacgagaagcgccagcataatttatccaccagaagctccaccgtggtctactcaccagaagctccagcatgatttacccaccagaagctccagcatgatttaccccaccagaagctccagcatgctccacccaccagaagctccaccatggtctacccaccagaagctccaccatggtccacctaccagaagctccagtatggttcacccaccagaagccccagcatggtccacccaccagaagctccaccatggtccacctaccagaagctccagtatggttcacccaccagaagccccagcatggtccacctaccagaagctccagcatgatttacccatgagtagctccagcataatttatccaccagaagctccaccatggtctactcaccagaagctccaacattatttacccaccagaagctccaccatagtccacccaccagaagattcagcatcgtccacccactagaagctccagcatcgcccacccaccagaagctccagcatggtccacccaccagaagctccagcttcttctaaaaagctgatgctgtttgccgtatttgctttctttttctgggaggtggaggttgcagtgagccaagattgcaccactgtactctggcctgagcaacaaaggcagagactccatctcaaacaaacatacaaacacaacaaaaacaaaaaaacaaacaaacaaaaacacttttattttaggtccaggggtacatgtgtgggtttgttatataggtaaactcatgtcatagggttttgttgtacagattattttgtcacccaggtacaaactttgtacacaataagttatttttttctgatccagtccctcctcccaacctgcacccttaaagaaaatgtgccacatatgcatgggatactatgcagccataaaaaaggatgagctcatatcttttgcaggaacacagctggagctatggtatgcttagcaaaccaatgcaggaacagaaaactaaataccacacgttttcatttaaaagtgggagccagccgggtgtggtggctcacacttgtaattccatcacattgggaggccaaggtgggtggatcacttaaggtcaggagttagagaccagcctggccaacatgatgaaacctcatttctcctaaaaatacaaaaattagctcggcatggtggcgcatgcctgtaatcctagacactcggggggcactgaggcagaagactcacttgaacccgggtggtgaaggttgcagtgagccgagatcgtgccactgtactccagcctgagtggcagagtgggactcagtctcaaaataaataaataaatttaaaaataaagattctatcatgaaagagcgttaccagccaggcacagtggctcatgcctgtaatcccagcactctgggaggccgaggagggcagatcatttgaggacaggagttctagaccagcctgaccaatatggtgaagtcccgtctctactgaaaatacaaaagttagccaggagtgctggcagacacctgtaatcccagtgacccaggaggttgaggcaggagaatcacttgaactcgggaggtggagtgtacagtgagccgagatcttgccactgcagtccagcctgggtgacagagtgagactctgtctcaaaaaaaaattaattaattaaaaataaaagtgagagctaaatgatgagaacctatggacaagagacactgatttttttttttcctggtgttacccacatcacgaagaatattgttttttcaccccactgatgcttggaaccacctgtcaagcagttttctcatattgttttatttaaatagaaggaagaagggaagactctgaccttccagggtacctggggaggtaagaagtaatctatgtaacaggaatggggaaagagagcaggtaggtagagagacgagttttttgttttttggttttttttttggagatggagtctcactctgtcaccaaggctggagcgatctctgatcactgcaacctacacctcccgggttcaagcaattctcctgcctcagcctcccaagtagttgggattacaaacatacaaacacaacaaaaacaaaaacacaaacaaacaaaaacacttttatttaggtctaggggtacatgtgtgggtttgttatataggtaaactcatgtcataggggtttgttgtacagattattttgtcacccaggtacaaagctttgtacacaataagttatttttttctgatcctttccctcctcccaacatgcacccttaaagaaaatgtgccatgtatgcatggaatactatgcagccataaaaaaggatgaccaccatgcctggctaatttttgtatttttagtagagacagggtttcaccatgttggccaggctggtctcgatctcctgacctcatgatccaccagccttggcctcccaaagtgctgggattacaggcatgagccactgcgcctggccagttgactgcttttgtaatcaagaaaccttgtgatatataaatagccactttccaaaaaaaaaaaatcaccagaatacctccagtattgacaagctgtggggtgttgagagaattcgagattgtcttagcagcctgggacctttctgtactcctgaacagaacagtggacgatgatctcattgttgaatcaggaggatgtgctcctattcacaacagcaaagacttggaaccaacccaaatgcccatcagtgataaactggataaagaaaatgtggcacatagacaccatggaatactatgcagccataaaaagggatgcattcatgtcctttgcagggacatggatgaagctggaagccatcattctcagcaaactaacacaggaacagaaaaccaaacaccccatgttctcactcataagagggagttgaacaatgagaacacgtggacacagagaggggaacataacacactggggcttgtctgggggttgggggaaaggggaggggcagcattaggacaaatacataatgcaggcagggcttaaaacctagatgatgggttgataggtgcagcaaaccaccatggcacatgtatacctatgtaacaaacctgcacgttctgcaaatgtataccataacttgaagtgaagaaggagaaggaggagaaggagaaggagaaggagaagaagaagaagaagaagaagaagaagaagaagaagaggaggaggaggaggaggagaaggaggaggaggaggaagaaggggaaggggaaggggaaaaagaaggagaaggagaggaggaagaagaggaagagggagaagagggagaagaaggagaaggagaggaggaagaggaagaagaagaagaagaagaaggacaaggagaaaaggaggaggaggaggagcgggaggagcaggaggagaagaagaaggagggtgtgttcacatggaaatttgcttctagcacccagtggttaaaaggcactcaaaacttgtaatcacagagagggtggtgatgaaggtttttaaacatgtcattcatttggaagaaaacacttgtgtctttacttgtctagatgtaatgccaagtacccacacttcctgtacagacagaacttcatttactatttattcaatttcctcaaagagcagggtgaaatagttccctttcctatttggggggaaatgggttattctttacgggggttttgttaagagaattgtaaatgatttcttccctgtcatctgtccaaacagctcaatggggaactttattagaaccaaagcatgtattaaaaagtctcggccaggcacggtggctcacatctgtaatcctagcactctgggaggccgaggtgggtggattacctgaggtcaggaggtcaagaccagcctggccaagaaggtgaaacctgtgtctactaaaaatacaaaaattagccggacaaggtggagggttcctgtaatctcatctgctcgggaggctgaggcagagaattgcttgaacccgggaggcagaggttgtggtgagccgagatcacgccactgcactacagccagggtgacagagtgagactctgtctaaaaaataaaaataaaaataaagagtctctaaaatcttcattgaaaactcatttcgtctcaagacatcatttattttgcaaatgtattcttcgtgggtggcatgtgaatttgtaatgtgatatagaaattttggaatttacttttttgttgttttttggttgttatctttcttttttaaaaattttattattattatactttaagttttagggtacatgtgcacgacatgcaggttggttacatatgtatacatgaatttacttttaaaaagttttaaataagaaggaaatactttctaggtaaatttaattgtatatagaagacctaatgggtgagactctgccttgaaagctggagacacgtcagtaaataagaatacacaattagaataagaaagagtaacaaacactctgccctctaaagcttccattctgcttggagaaaccaagaaaaacccgagaatcttggtcaaatacaatctagggtaatgcagtcagggagctgtctggtgagtgttggaggccccataggaatgctgaggaagaagaagttgaggaagaagaagacgcttgtcactaggagaattctaagaataagaaaggacgaagacaacgtgatttcaccaaagatgtccaagttgtaattatctcgtggtagacggaataatggccccaaagatatccatgtcctaatccccatgtggtagacagaataatggccctaaagatgttaccaatatcctattccccatgtggtagacagaataatgtccccagagatgtccatgtcctaatccccatgtggtagacagaataatggccccaaaaatgtccacatcctaatccccatgtgggagacagaataatgatcctaaagatgtgaccaacatcctatttcccatgtggtagacagaataatggtcccagagatgtccatatcctaatccccatgaggtagacagaatagtggtcccaaagatgtccacatcctaatcccgtgtggtagacagaataatggccccaaagatgtccatgtcctaatcccatgtggtgaaaacaataatgttcccaaagatcttcacatcctaatcccatgtgggagacagaataatggcctcaaagatgtccacatcctaatcctcatgtgggagacagaataatggccccaaagatgtccacatcctaatctccatttggtagacagaataatggcctcaaatatgtccatgtcctaatcccatgtggcagacagaataatggccccaaagatgtccacgtcctaatcctcatgtgatagacagaataatggccccaaagatgtacacatcctaatccccatgtggcagacagaataatggccccaaagatgtccacatcctaatccccatgtgatagacagaataatggccccaaagatgtacacatcctaatccccacgtggcagacagaataatggccccaaagatgtccacgtcctaatccccatgtggtagacagaataatgaccccaaagatgtccacatactaatccccatgtggtagacagaataatggcctcaaagatgtacacatccttatccccacgtggcagacagaataatggccccaaagatgtccacatcctaatccccatgtgggagacagaataatggtcccaaagatacccatgtcctactcctcatgtgatacagagaataatggtcccaaagatgtccatggcctaatactaggtagcagacagaataatggccccaaggatgtctacatcctaatccccatgtgggttgacagagtaagcacccccttccccccctcaaaaaaatatccacatcctaattctagaaatctgtaaaaacctgtcatggctaaaaagattttgcagatgtgattagtttaagaatcatgagatgaaatgaccctggattatccagctgggtctaagatcatcacaggatctttgtaagagggaggcaggagtgccagagccagaggaggtgatgttaggacaaaagcaaaggtcagagtcacagagaaattagaagatgctgcactactggctctgaagttcaaggaagggtccaggagccaaggaatactctagaaacattcccctagaagcaggaaatggcaaggaaactgattctcccccagaacttgcatcaagagggaagttttgctgacaccttggttttaggccagtgagacccagggtgggcttcaaaactacaacactgtaagacaatacatttgtgttgctttaagccaatacgaatgtgatcattggtgatggcggccagaggacactcacagaaggagtaatgtactggaggtctgcagcaggaatgaatttggcatgactggggggatgcccaagggggcagcaaagaagaacaagcaaaggctaaacgtgatgactccttgttttagaagaacccccttcagaagaagaatcagtaaagcaaaggctgaactcaactttgtcttcttttcttccccagacataatttacgttattttattgggaccacagagtcccagttggagcaagtgaccaggggcagagttacaaagaagccatagggaagtagttagattgtattctgacttcgatgtgaaattattggcgggttttgagtggcaatgagggatgtcttattcagctcgggttgccataacaaaaattatagactgggtggcttaagtaacagccattgatttctcacagttctggagatggggaagtccgagatcaaggtatggcagatttattgtctggagtgggtcctcttgctggttcacagatggtgcattcagagagagaaagagagagagagagagagcacttttgtgtctctcgctcttcttataaggatactaatcccgtcatgaaggacccatcctcatgacctcatctaaacctcatcacctccagagacttcacctcctaatatcatcccattggggattagggtttccatatggtgcattttggagggacatgactagtaggggttaggccttcaacatacaaattttgggaaactttgctatttagtcattagcaagggatgaggaccacaagctaaaaatcatctctatttttgaaagatttctctgcttaagaataattccaggatcaaagcagaaaccaggacagaagccaagagatcaatcaagaggatgtggctatgatccagatgacatatgtcatgcatgagggtgaagaaagcaaaggcaggaaaatctgatccaatttgacaaatgtttgaggtcattcaagagacttgccaatgaattgtataagggggagatgagagaaagaagagttcaaagtttccaaagtcttctgccaaaacacttctcaggggtggtggtgaatccagtgaaggctttccagatggtttgggatgggttaacttggaagccctaatcatttatctgagctgagaagttgagcatacagttacatgcatgaatctgaagtagagaaaagatgtcaaagccagagatgggaatttaggattttgagtggatgtgtcaagtcctggggctgagtgagatcccctggagagagaaggaagcttatgtttgagccctagttcagcccaacatttagaagaacccctttgggaagaggagaagaacgagcaaaggctaaatgtgactccctgttttagaagaacctccttcagaagaagaatcaataaagcaaaggctgaactcaactttgtcttcttttctcccccagacataatttatgttcttttattgggagtttgtttcccactcaacctttcaggttagagctctgaagtcacgtttgatttttccctcaacatcaaagagacacaacagtttgcttctgtggtgactgttttttgtttgtttttgtatttttgtttttttgtttttgtgtgtgtgtttgtgttattttaatttgtttgtttgtttgagacaatgtctcactctgtcacctgggctggagtgcagtggcacaatctcagctcactgcaacctccacctcctgggcttaagtgatcctcccacctcagctcccctagtagctaggactacaggcacacaccaccactcctggctattttttctatttttaatagagatgggggtctcatcatgttgcccaggctggtcttgaactccagagctcaagtgatctgcctgtcttgacctctcaaagtgctgggattacaggtgtgagccatggtgcccagcctcactggtgactttgaatgccttctcacttcttccttcccactccatgctccaggttcaaagactccattaccaccatccatcccatgccagagtctccaggcttccatcttcagtgccatcccttctcatccatcctatgcatgggttccaaggtaataggtctaaacacatttagacctatttaatatgtataagcataaatgttgacatgactggtcacaaaatgttggtggtttctcatcaactgcagagaatagttcaggatccttacctaagtgtctgagatctttcataaattcacacatggaaagatgtggcctctctgtctgtacttcatcacatcacacccagcacctcaatctctgactccatcatcaatttcctagttccctgagtttgcctgcccagccctgagtcattgtaacatctgattcatcttttaaagtttaacaacaacaacaacaaaatcatctgctctgagaagccagcctttctcaggtgcagagattatcccagagatagacatatggttcaagacaggctagttaaccttcccctgaatttgatcagcaaagactgagagggtggtgggagaagctcagactgtgaatctatagctacagcagctggattttttttttccatcctatattccaagactttttctgagagaatctagtctggaacccagagagaagcagagagttgagagagtcatcagaacttgggagatccctgagaagctgtccacctctactttttgagactgtttttcctagactcccttgcagctctgtgtgactgtatgatgaactttgagctcatgagaagtaagtaggaatgtattaagaccataaaaatctctttaattttgtaaaaaagtgaatgtgaactcttccctctccttttgctgctagctgcaatggagatgtgagggctggagaccatgccaccatattgaaccatgagtagaaagtcacatactaaaatagtggagcaacaacattcaaaatgcctgacatcttgaatctgtacaataacctggaccccttgttctggcctcctatcatatcagagagaaacaaacttccatcttatttaagtcatgattatttgcttatttccatacatttgtttatgcagttatacgatatttattccatctatctattatctatctatcatctatcctatctatctaaccatctacccatcatctatcctatctttctatccctctatcatctatctatcatccatcttattctatgtgactatcaaccatcttattctaactatctatctatctatctacctatctatctatcatctctcctatctaatctatttatctatgtatctatccatcttatctatctacctatcatttatctatcctgtgtatcaatgtatctatcatgtatctatctgtcctagttatctatcaattatgtatctatccatcctatttatctacctattttatgtatctattaaacatctacatatctatatatattacctatcatctagctatttatctatctatcctatgtatttatcatctatttattctatctatatctatttttttctctatctatgtctctatctatctatctatctatctatctatctatctatctatctagagatttcttaagtccttgggaatcctgaggtcagctccatcataggatctcacagttatattagttcaacaattttctttctctgcctaacttactctgagttgtgtttcagttgctgttgattggaacaaacctcaaaaagaaattgggactattataatattgcatttatgggtggctgacttatgatgctgccttccttgtctctggatcctgagtcctgcatccaacccagttccacagcctgggtatctaaccgtttccctggaactcagtaacatttgaactgaaatgccattttcttgttgggatcattataatactttggaaaactgccttggaattaatgtggttaccctttgcatctgtaaaataaacaggcatttctttagaaggagaaactaaggtttcacaaagaccttcagggtctgtttttcttacaccagaagtcacactcaggccaagtaacatgttctggttctggcccttagtgctcctggttggactaatgcctggggctccctcaaggatttccttccccatctctccctattttagcctctccccaggggaagaggacattgctttcatatcctaacaccttacctgaaaatcccccatgtctctaaaataaagatggaggaagctcccccccattatttatttatttacttacttttttgaaagacagtctcgctctgtcacccaggctggagtgcagtggctcgatctccactcactgcaagctccgcctcccgggttcacgccattctcctgcctcagcctcccgagtagctgggactacaggtgcccgccaccacgcctggctaatttttttgtatttttagtagagacggggtttcaccgtgttagccaggatggcctcgatctcctgacctcgtgatccgcctgcctcggcctcccaaagtgctgggattacaggtgtgagccaccgtgcccggcctctctccctctttctatgtatatgtcagtctttctctctctgtgtctctcttagtgtctctctttctttgtatctgtccctctgtttctgtgtctccctctttctatcactatctctctgtgtgttgctgtctcttcatctctgtctccctctctctctctgtctgtctctgtttctgcttctctgtctccatctctttctctctctgtgtctctcttagtgtctctctgtctctgtctttctctccatctctgtatctgtccctctgtttctgtgtctccctctttctatcactgtctctctgtgtgtttctgtctcttcatctctgtctccctctctctgtgtgtctgtctctgtttctgcctgtctctgtctctctgtctccatctctttctgtgtctctcttagtgtctctctgtctgtctctgtctttctctccatctctgtatctgtccctctgtttctgtgtctccctttctatcactgtctctctgtgtttctgtctcttcatctctgtctcgctctctctatgtatctgtctctgtttctgcttctctgtctctgtctctctgtctccatctctttctctctctgtgtctctcttagtgtctatctgtctctgtctttctctccatctctgtatctgtccctctatttctgtgtctccctttttctatcactgtctgtctgtgtgtttctgtctcttcatctctgtttccctctctctctgtgggtctgtctgtttctgcctctctgtctctgtctctctgtctccatgtctttctctccacctccctgtgaggtgggagcctcacccttagcccactggctaccaccctggtccacatctttccccctaacagcgacagacgtaaaaaccacagctcctcccaggacactgcctcaatgtggccccatttctcttcatcagatctctcccttcaatgctaataagtctgtctccaactccgcgtttcttttggggaaaaaaaaaggagaagaaggctgggcacagttgctcacacctgtcatcgcagaactttgggaggccgaggcgggtggatcacaaggtcaggagatcgagaccagcctggccagcagggtgaaattccgtctctactaaaaaacccaaaaaattagccggccatggtggcagacgcctatgatcccagctacttgggaggctgaggcaggagaatcgcttgaaaccaggcggcagaggttgcagtgagtcaagatcacgccactgcaattcagcctgggtgacagagcaaaactctgtctcaaaaataaaagggggaaatattcgattaataaacaacagcctcacatgtgctcaccactgggttgaagcaaagccttcttccaaaagcaaaaattggaaaaatatgctaccgacagactgcccctaaaggtaatattaaacagggactccaaaggcagaagagaagctgacccaatgcgacatgaaaattcaggaaggacacaacagcggtgagaactcaagataatgtgagtaattgtaaatacatattgaccttataaaacgagtcattgccaaatttgatctggtgacctgtataaaatgtcagcttctgaggggagaacactgtccacaataacaacaaggctgtacacataggcatggtggccttggggagcgtttgccaggctgcaaaagccacctcgcaggtaggtaggctggagccaggtgggaggtgggtgggagccagcaggagccggggggccctctcaggccgcttctctgggtaatgtcgtattcgccacacagcagcctggtggccctgcctgttgccttcgaaagagagcctgccatgatcctggctgtttctgtctccaggtacgatgaagaactggcccggggtgacagggctgaccgggagctgagaagtcgtcagggccagtctctgtggcccagagcaggccgatagagagatcggggagagctgtcctcaccacctggaagtgagtcccacccagaccttatcaaaactactcactccacctgggccgctgctgaagccctattttgaaatttcccttttccagagcttttttcctgtcctaagccccataaataaatgaaggcacttctttggaaggttatggagtctgtttgactagtgctaaaggaaacaattcacgcagatgtataaaacttgctttttaaaaaaaaatttaacctaagcagaattttcatattaaaaactcactttttttgacagaaagtaacagcttcagcatataatttgatgtttcacaaggtttaaacattaaaaaaactctaaattaaaaacaaaacaaatcttatagactagtcctgccattagagaggaatgtatttaactgacagctcttttagttgcgtttctttttacttgactgtgatatttttttttttcctgagacagagttttgctctgtcacccaggctggcgtgcactggcacaatcttggctcactgcaacctctgcctcctgggtaggctcccaagtagctgggattacaggcatgcgccaccacacccggctaatttttgtatttttagtagagatggggtttcaccatgttgggcaggctggtctcaaactcctaacctcaggtgatctgcccaccttggcctcccaaactgctgggattacagatgtgagccaccatgcccagcttacttgactgtgattttgaggaaaagaggcgactagaaatattcctttgtaatatatctttacaaaggcctttgtctaggtgctcccaggaagacctgtcttcttttcttttcttttttttttcttttcagataggatctctccctgtcacccaggctggagtgccgtggtgcgatcatggctcactgcagcctcaacttcctgggctcaagtgagccacccgcctcagcctccggagtagcggggacaacacaggcacacaccaccacccccacctgatttttaaagtcttttggtagagacagagtttcaccatgtcagccaggctggtctcaaactcctgggcttaagcaatccacctgcctaagccttccaaagtgttgggattacaggcatgagccaccatgcctggattcaaaaagacctgtttctaccacttcagttttgtggatgaatctgttgtaaattgaagcagatgagtgaagacaggtccagctgtgtgccttttatgaagtcagcagctgagtttgctgcagggaagtgccatgggcagccaggagctgtgggaggagtgatggctgtggggacaggctgcacgaacatggtgttcccatgccgtttcccagtagcccagtgacttacaggcgtgtatggagaggacctgagttggtgggtagatggacagatgcatctgagtaataactcatgagttacagtgctgttcttaggaagggtctttttttttttttttttttttgaggtggagtttcactcttaacaccctggctggagtgcaaaggcacaatctaggctcactgcaacctccacctcctgggttcaggtgattctcctgcctcagcctcccaagtaggtgggattacaggcgcccaccaccacgcccaactaatttttgtatttttagtggagacagggtttcaccatattggccaggctggtctcgaactcctgatctcgggtgatcctcctgcctcgacctccgaaagtgctgatattacacgcgtgagccaccgcgcctggccaggaagggccttttactcatggtcatattaacacgtatttgctgaagtttcactcgctgtcttgagtttatctttaaagcttgccacctgtttttgttgtgatgctagtaacaggagtttgttctcccaaatggcaccaagggtatgtccttcagataagggtcttccctgacttgcccaagctctctcagtactcatgcatggacgtgtgttaagtgtacatgctatattgtgtgtgtgtatatatgtgtacatatatttaatgatgtttcactgccagttagggaaaaataggtcttttcaacacatatggtagaatagaaagtgagagaaacatacatacaaatggcacttggctagactccaaataaactgcaattggtggacttttcagccgttccttcttcatgatcttattggtatgtgtgttgtgtgtgttccctggtgtttaagtttttgtttttgttttgttttgtttcttgagacagagtcttgctctgtcgtccagcaggctggagtgcagtggtgcgacctcagctcactgcaacctctgtctcctgggttcaagagattctcatgcctcagcctcccaagaagctgggattacagatgtacaccaccatgcctggctaatttttgtatttttagtagagatggggcttcaccatgttggccaggctggtctcaaactcccaaccttaggtgatctgactgcctcagcctcccagagtgctgggaatacaggtgtgagccactgcgcccagccgtggcatttagttttaatgtgtttgctgttgatggcgggtgtgggatggagatccccgagtcagacttggccttgtggcctgactctgctgtttattagctgtttcccaagcctgtccctggggtcgttgcacctttgtttcccactgtataaaatggggagttcagtggccaggcgcagtggctcatgcctgtaatcccagcactttgggaggccaaggaggttggatcacctgaggtcaggagttcgagaccagcctggccaacatggtgaaacctcatctctactaaaaatacaaaaattagcctggaggctgaggcaggagaatcacttgaacccaggaggaggaggttgtggtgagccgagatcgcaccattacactaaagcctgggcaataagagcgaaactccgtctcaaaaaaaaagggtggggaggagttctgcttgcctcaggaacaaccagtgtcactgcacagggaccctgcccacccacctcactggctctggcgagccctcttaccccccaggagggggcatcctttgaacagctggcggctccacctcggctcctacacacagaggtgaaagacaccctgttaactgttcccagctcttccaccggtttttacaacctggttttcagttacattgttttgtttttgcctctctctgggagaagggtggagtccctggttgggaacgttggcctctcaggctctggggccatgtagtcctaatggaagagtcacaccaagtggttagtttgctggtgacccagttgctaggtgagggtgaggctccgctaagtggatttatgtcatatagtgactgtctcattaatgatttactgatgtcatgttccgggcagatgtttcctctgagcacttccaggacacaggtgggaagggtgcggtgttggcagccagcctcgggaggctgtcgggccaggaacagccccactcagcgctaggccgggcccgagcagtgagccctgctgggagctgtccaggagccgctgttgttttcttgtcagcccccacccacttgatgggatgggtcccaggccagagggttgcatcctgtggtcgttttcaccaaatttgataagattggtttttcccaatataaacccatcctccactaggcacagtagctcacgtctgtagtcccagcacattgggaagctgaggtgggtggatcacctgaggtcaggagtttgagaccagcgtggtcaacatggtgaaaccccatctctactaaaaatacaaaaattagctgggtgtgatggttcatgcctgtaatcccacctacttgggaggctgaggcagaagaatcacttgaacccaggaggtggaggttgcagtgagccgagatcgcaccactgtactccagcctggacaatggagcaagactccatctcaaaccaaaccaaaccaaaccaaaccaaaccaaaccaaaccaaaccaaaccactatccttcacctcctttgcacacgggcttctccctgggtattagtgagggcctggtgacaaccttctcactgtctcccttctcctccacctcccacctgggctcccatggagaccccatcagtctgggcccgcatctggttgcgctccaccggctgctaggactttcctcgcagggggccatttcccctccacacagtggttcttcagggggatccataaagcctcctatgcttgccgcccgttggcctgttggctcacactgccacacaccatgtccacaagcgccaaacacacgcaactcctctctgagtcctcccaggggccagcgcactctccaccctcccctctggagccattcccagctgtgttgcggccatctggccctctccccacagcacccctgcagcctctctggtccgggcaggcgaaggtctcctgcagggccctgcctgccggtaacggcacagcgtctggggctgctcagtgactgggcaccctcaggctgtttgtgtgtcgcctaatgtggactgtgccccagcggagggccctggggcatgtgaggaccctttgtgagcaggcgggagcacatccacctttgattctagtccctcattgtggaagatgagggattttgatcttcactgatttgccccagcctgaaccatattagatctcacatcctgtgaacaatggcagcctcctgcttttgtcctgagaagcattcggagcgctcctccagtgacagatgcaaacccaccttgctcatgctcctgcccagccactggcactctgtcagcaggaacaagtctaggggtccatggcttccctcaggcccaggcccaccctgcctgccacttggccaacattcccccccaaatccagtttaactcacctgatctcccctcccctccccaggttcatgccattctcatgcctcagcctcccgagtatgtgggactacaggcatctgccaccatgcccagctaattttttgtatttttagtagagacagggtttcactgtgttagccaggatggtctccatctcctgacctcgtgatccacccatgtcggcctcccaaagtgctgggattacaggcgtgagccatggtgcccggcctagttttttatttttagtagagatggggtttcaccatgttggccaggctggtcttgaactccagacctcaagtgatccaccagcctccacctcccaaagtgctgggattacaggcatgagccaccatgcccgaaacaccgtgcctggcttccagccaaatgtttttgagtgatggcattagtgttcttagagatgtgcctctggggcagatcagaggatgacggagctggtgagaggctggagggagatctggcagtgcaggccagaatgtgaactcaggcggagccctagggacaggaggaggggagttgcgcacagggagcctgcacactgcgtggaaggggacctgaagagactagcagttctcaatggcccagtagggggcgtgtgttaaacggggtttgagccctgaacgtagaaggaggtaaactgccaagctgcagtaacaaacgtgcttttcagaagctgttcagaaaggccacgctactcatggttatgaataatgctgccttgaggccatgactgaatagcaagaacgtcactgggcagcttcccttcctgcatcttgtactggttaaaatgaaatcagaaatttttgttttttttgagacagaatcttgctctgttgcccaggctggagtgcaatggcctaatctcgattcactgcaacctccacctcctgggttccagtgattctcctggcttagccgggattacaggcacctgccaccatgcccggctaatttttgtatttttagtagagacggggtttcaccatcttggccaggctggtcttgaactcctgacctggtgatccacccacctcccagcactgtattcccaaagtgctgggaatacaggcgccagccaccacgcccagcctgatagctctttttttttgagacaggttatcgctctctcgtccaggctggagtgcagtggtatgatcacagctcactgcagccttgacctcctggggtgatcctcacacctcagcctcccaagtagctgggattacaggtgcatgccaccacaccctactaatttttatttattttgttttactttattttattttattttattttattttattttattttttcacacagagtctcactctgtcacccaggctggagggcaatggtgtggtctcagctcactgcaacttctgccttctgggttcaagtgattctcccgcctcagcctcctgagtagttgggattataggcatgtgctaccacatgcggctaacttttgtatttttagtagagacagggtttcactatgttggccaggctggtcttgaactcctgacctcgtgctccacccgcctcagcctcccaaagtgttgggattacaggcatgagccaccttgcccagctgctaattttttatttttttgcagccacagagtctcaccatgttgcccaggttggtcttgaactcctggcctcaggcaattggcctgccttggcctcccaaactgctgggattacaagtgtgaaccactgctcccctgaagtggtatcttattttggttttgatttgcattttttctgacggctaatgaggttgagtatcttttcatgtgctaattggccatttgtataccttcctgggagaaactgttctgatttttttttttcttgagacagggtcttactccatcacctaggctggagcacggtggcacaatcacagctcagtgcagcctcaacctcccaggctcaggtgatcctcccaggcagaaccacttcagcctcccaagtagctagaactacaggcatgtgccaccatgcccggctaatttttttgtattttttgtagagatggggttttgccatgttgcccaggatggtttcaaactcctgggctcggccgggtgtggtggcacatgcctgtaatcccagcactttgggaggccgaggcggatggatcacaagatcgagaccatcctggttaacatggtgaaaccccgtttctactaaaaatacaaaaaattagccgggcgtggtggtgggtgcctgtagtcccagctactcaggaggctgaggcaggagaatggcgtgaaccggggaggcagagcttgcagtgagccgagatcacgccactgtactccagcctggggacagagcgagactccgtctcaaaaaacaacaacaacaacaacaacaacaacaaaaaacaaagaaaacaaacaacaacaaaaaaacccaaaaaaaaccataataatagtgataaggccgggtgcggtggctcatgcctgtaatcccagcactttgggaggctgaggcgggaagatcacgaggtcaggagtttgagaccagcctggccaacacagtgaaaccccgtgtctactaaaaatacaaaaattagctgggcgtggtggcgggcgcctgcaatcttctcagactcccaaccaccggctcctgagccgcggcaactccgtgtcaccttttcaccgccccccacctagccccaaatccccaatccaggcccaaatccccgctccaacccccaatccgcgatccaatcccccatccgcgatcccaaatctgcgatctagcccagaatccgcgatccagccgggtccaccacagccttcagcagcgacactcccagcttccgacctcttagatccactgagcctcgcaagggcattagcagcgcccttgcacggcgggggccgcccggctcccagaagccgctcccaggcggcgcgccggcaggtggggctccagcccggggcagtcgccgctgggctcgcgggttctcctgagctggtccgggctgccccaggaccacaggcgcaggatcgcaggcgcgcagcctgcccggcctcaggagcagggcctgtctggccgtgcagccccacttaatcttaatagcaaataaaactcaacagtatgctgtggtatattctacaatgattctacacaattgtagattgcattaggataatgttttttaaaattattttctcggtaacaaatggacactcaaaattttatttattttaattttattttttttttaaacagagtttcactcttgttgcccaggctggagtgcaatggcgcgatctcggctcactgcaacctccgtctgccgggtacaagtgattctcctgtctcagcctcctaagtagctcggattacaggcatgcgccaccacacccggctattttgtgtgtgtgtgtgtgtgtgtgtgtgtgtgtgtgtgtgtatatatatttagtagagacagggtttcatcatgttaggctggtcgcaaactcctgacctcaggtgatccacctgccttggcctcccaaaaggctgggattacaggagtaagccactgcgcctgggcaaaattttattttttaataatgccaagtgatttcattttaaattaaactgcaccataaattggattattttcctgcatgagtaccttgctcttcaaacaaaaacattttttgaagaccaaatatattgcatagttttttttaaaaaagctctgcctgtgtgcattggcttacgcctgtaatcccaacactttgtggaggctgagggaggaggactgtttgaacccaggagtttgagactggcctgggcaacacagtgagacactggctctacaataatctttctttaaaagttagccaggtatggtggtgcacagccatggtcccagacacttgggaggttgaagtgggagtatagcttgatcctgggaggttgaggctgcagtgagctatgattgcactcccgcctgggtgacagagcaagagtctgtctcaaaaaaatgttcttactgtataagaattatgaatgacatttattttatgttaaaacagtatattttatctacaaaaggagtaaaagacagtaatagaaaaattggcacataaacaaaaatgctaaaaaattcaaatttaccaataatcctatcacctaaattgataatttttaatataattaaatgtaggattttaaaataaatttcttttaatttatttatttaaacatatagattatttttagaccctcttcagacatcccccattgaataagttccatgatttacaggcctactctctctatggttaaatactgtattgctttcaatgaacaacattttttataaacattttcacagaaacaaatttgggcacattgagacatgttttcttttcaaaaagtcctagcactttaattactgtgtaaagagatattagtgtataattttcacacatattgactaacatccctgcaaaatgttgaatcaatttatactttcagcaccaatcggcaaattaatgtccattatgctttcgcttcaccaaaactgatacctatattttattttgctagacaaaaatacatattatcttaatttgtgtaactgtatttaatagaaagattaaatttttttcagatgtatcatagggcatcattttttcttgagtctggtgggtgcttagttcctttaaagcattaatcatgtatacattaattttatgtgcaaaacaatcattaagtacaatttgaaatatggaaaaataaatagctggattaagaaaaaaacaaatagagcttctggaattaaaacatccactaatggaatttcaaaacacagttggaatctttaacaataaactagactaagcagaagaaataattttagactttgaaaactggtcttgcaaagtaacccagacaaaaataaaagaaaaaagaactgaaaaacaaagcccttaagaaatgtgggattatgtaaagtgaccaaacttataacttattggcattcctacaacagaagaataaaaagtaaccaactaggaaagtatatttaggggaataatttaggaaaagttctctagtcttgctagaaaggttgacattcagatataagaaattcagagaacacctgtgggatagtaaataagatgcccattcctaaggcatccacagtcattagaatagccgtggtcaatgcacaagaaaatatattaaaggcagcccaaacaaagggccaaattacctataaattaaattagattaacaacagacttatcagcagaaacactgcaacctagaaaagattggggtctagcgttagccttcataaagaaaaaaaaatgccatccaataatttcttttttttggagacagaggctcactttgccacccaggctggagtgcagtggtgtgatctcagctcactgcaacctctgcttcctgggttcaagcaattctcctgcctcagcctccccagtagctgggattacaggtgcccgccaccacacctggcaaattttggtattttttaatagagatggagtttcttcatgttggccaggctggtcttgaacccctgacctcaggtgatctgcctgcctcagcctcccaaagtgctaggattacaggcatgagccactgcacccagtcatgcaagaagttcataacctgccagattgagcttcataaagaaaggaaaataagatatttccagacaagaaaatgctaagggaagtcattacctccagactgactctaaaagaaatgtttaaaggagtttgactcgtgaaaataaaagaatgatacttgctaccataaaagcatccatgaatacaaaatgtacagaacctataaagcaattaaacaattgagactacaaggtaactagctaatgctataaaaggaagaaaacctaacacatcaatattaagcttgaatgtaaatggctgaaatgctccacttaaaagacacagagtggcaaactggataaaaaaacaagacacttctgctgcctttgagagacccatctcatgtgtaatgataccaacaggctcaaagtaaatggatggaaaaagattcatcacataaatgaaaaacaaaaaaggagaggtattgctattcttgtatcagataaaacagacattaaactaacaacagtaaaaaaaatacaaagaatgacattatataatgatgaagtgttcaattcaacaagaagacttaactgtcttaaatatatatgcagccaacattggagcacccagatttttagaataaatattactagacctaagaaaagagatacacagctgtacaataatcgtggaggacttcaacaccccaccgacagcagtaaggagattagttaggcagattattaggcagaaaactaacaatgaaactgtggactcaaattgggctcttgaccaaacagacctaatagatatctacagaatactccacccagaaaccatagaacgtacatttttctcatttgcacatggaacattctctaaaattgaccacatgctcagtcataaaataagcctcaataattttttaaaaatcacaactatattaagtatcttctcagaccactgtggaataaaattagaagtcaatatcgagaactcgcagaaccacagaggtacatggaaactaaacaatctgctcgtgaatgacttttgtgtaaataacagaactaaggcagaaatttaaagaaattcctgaaacaaatgaaaatagaaacataacataccaaaacgtctgtgatacagaaaaaacaatgttaagaggagagtttataacactaaatgcctacataaaaagagagaaagacctcaaattaacaagctaaaatagccaaacacactagaaaagaacaaaccaaacccaaagctagtagaaggaaataacaaaggttagagaataaggtaatgaaatcaggaccaaaaaagccatacaaggaatcagcaaaattaaaaagttggttctttgcaaggacacatacaaatgatagattgctagttagattatgcaagaaaaaagaagattcaaataagcacaatcaaaaatgacaaatgagacattgcaaaggataccaccgacataaaaaaagatcctcagaatatctttgtgtgcagaaactagaaaacctagagaaaatggatacattcctgcaaacacaccaccttccaagactgaatcagaaagaaaccaaaagtccactagggccagtgccaacaggaaatgtgggattgaagcctccagagtccccactggggcactacatactggagctgtgggaatggggctgccacctcgagatccctgaatggtagagccatgggaagctttcatcctgagcctagaaataccacaggcacgcaactctgatccaagacagcagccatggtgactgtacactgcaaagccacagaggcagagctgcataaggtcttgggaacccaccccttgcacaagtgtgccctggatgcgggacatgaaatcaagaattattttggagcttgaaggtttaatgtctgccctactgggtttcagatttgcctgaggcctgttgcccctttcttttgcccaacttctccatttgggaatgggaatatttacccaacacctgtactgcattgaatattggaagcaaataagttggttttgatctcataggctcatagatggaggaatgtaccttgaagctcagatgagattttggacttttgagttgatgctgaaacagcttgagatttttggggactactgggagaggataattgtattgtgcaatatgagaaggacatgagatttgggagccatagggatgaaatgacattgtattgtgcaatatgagaaggacatgagatttgggggccataggggtgaaatgacattgtttggatgtgtttaccctccaaatctcctgttgaatgtgatcttaaatgttggtggtgggcctagtggaaggtgttgaatcatgggagtggacccttcataaattgcttagctccatccccttggcgatcagcgagtccttgctctgttgtgtcgcacgagagctggttgtttaaaacaccctgccatgttccccttcttgctcttgatttctctcttgacacgtgataccctggccctccctttgccttcctctgtgattggatgctttctgaggtctcacccaaacctgagcaggtgctggtcccatgcttctactgcctgcacaactataaaccaaataaatattttttctctataaatttaaaaaaatctgaacagaccagtagttaattatgaaactgaatttgtattaaaaatatttatcaagcaggagaagcccaggactagatgaattcacagctgaattctaccaaacataaaaaaaatagatggtatcaatcaaggaattcctctctaactcattctacaaaaccagtatcatcctgacactaaaatctagcaaggaaacaacaacaacaaactacaggccaatatctgatgaacatagatgcaaatatcctcaacaaaatgctagcaaaccaaatccatcagcatatcaaaaatgtaattcatcatcattacataggttttattcctgagatgcaaggactatttaacatatgcaaatcaataaatgtgatttaccacataaacaaaatttaaaacaaaaatcatatgattatctcaatagatgcagataaaaacattcaataaaattcatcatccttgccaggtgcagtggctcacacctgtaatcccagcactttggaaggcagaggtggggcaatcaacagaggtcgggaccagcctgaccaacatggagaaaccccatttagaactaaaaatgcaaaattagctgggcgtcgtggcgcatgcctgtaatcccaactactcagaaggctgaggcaaaagaatggcttgaacccgggaggtggaggtggcagtgagccaagatcacaccactgcactccagcctgggcaacggagcgagactccatctcaaaaaaccaaaccaaactaaaccaaaacaaaaaaaaccctgaaatcatatcaattattttttctgaccggaatggaagagtattaaaaaatcagtaacaggaggaatttttttcccgaccgtctttggctccctctctcgccaccctttttcttcctccatctaccccaaaactttttccccaccattttttccccattgtctttttgcaaagccttctatactataccgctcacttccgttttccccacccatctaccccaaaacttgtccccaccgtgttttctccctctctctggccacccttttttccgcctcccgctctcatcatcctcttttgctccttcatctccccaaaaacatttccctcatcttttcccaaagccttctccccactcctgctgctcgccaccctctctttccccttccgtctacccaaaaactgtttccctatcgtcttttttcccttcctccttgccaccctttcccttctccatctacccaaaaacattttcctgccgtctttttgcaaagcctcttctctactcctgctcaccacgctcttttaacccatctacctccccaatttttccctgccatcttttcacaaagccttcccctcttcccgctcgccctcttctttcctctatcctgcttgccaccctctttttgccctccatctaccccaaactattttccccatcgcctttttcccagtcctctttccccacttcctctggccacactttctattctcctcccacttgccaccctcttttccccctccgtctacccaaacactttttagccactgtcttttctttctacactttcttttctgcctatcgtcttttagcaaaaccttttctctttccggctcgccactctctttacccttctcccactggccaccctctttcccccctccatctacccaaaagcttctctcctcactgtcttttcacaaaaccttctctccctcctgctcgccactctctcttccccctccctctctgcaccctcttttctcctcccacttgtcacccttttcccccctccatcactcaaaatctttttacccacagtcttctttccctttcttctctccccaccatatttttgcaaaccttctctccttcctgctcatccccgttcccccctcacgaccctctcttacccccttccatctacccaaaaactttttccccaccatctttctgtgaaaccttctctccctcctgtttaccaccctgtttttccccctccatctaccccccaattttttttcccaacatcttttcctcaccgtctttatgcaatgacttctccggctcgccatccttttttccttttggcactaaccaccctctttacccttccatctatcccaaaactattttccccttcctacctttccagccacactacagtgtctgtcgccaccaactgcagggaggccagccacggtgcagcaggctacagcctccagtctgtcctggtcctctaagccgggctcggagcagctcggtgagcagacacagaagaacctggaacagcctgactcttcttcagccccatttatgtactgaagttatgcatatgcggttcgtggactacactttccaggattggataagagaaagcccggaggcctactctgattggactttgttatcatgttctgattggatgaaagtcttaggacaaccaattagagtatgaaaataaagtccaatcagagaaggcctagagattttctctcacccaatcagaacatgtagtccagaaaccatgcgcgtaaccccatgtgcatgccgagcaggcctcacgccagtttagggtctctggtatctcccgctgagctgctctgttcccggcttagaggaccaggagaagggggagttggaggctggagcctgtaacaccgtggctcgtctcgctctggatggtggtggcaacagagatggcagcgcagctggagtgttaggagggcggcctgagcggtaggagtggggctggagcagtaagatggcggccggagcagtaagatggcggctggagtggtaagatggcggctggagtggtaggagtacagcctgagtggtaggagggtggctggcagctggagctgctcttgaccggctagagatctaggagaaggtggggactgtgcccaacgctggaggctgcagccttggccaccgcggctcgcctggctacggttggtagtggtgacggagactgcatctctgttagagtagtagaaaggtggcagggtaggtgtgctctctgcggctgcactgcctgcttgcggggtggtgggggagcgggtttggtgtgcttttggagctgcactccctgccgtggggggctggtgggtggcactatcaggtgttgaattgctggcagtggggcaggtttgctgcgctatcagagtctacactgcctaaggtggtggggggttggaggcaggttgtgtgtgccgtcgtgcactgccagcggaaggtggtggggaattaggggcattattagctgctacactggccgatgcagggggcgggttgggtgagctatcatgagctacaatgtcagcaacaatgccaactggcaggcagtcgggggtgctttaggggagctgtgaaatgttgcattgtccatggaggaaaggggaacttctgctcgtgttggaacgcggagggtgcacagagtttttgtggcaatcctctgaccaccgcagggccctcacacccaccatggttacccggcccttgccctcttgctctgtgttgtggggaccatctgggagccccaggcatggagtagtgggcaccatgggggctcagggtcctgtgggtggaggagtcaggaatgggaactggtacttgggtggggaggactggctgggtctgagtttctgctgttcttgctccccaactagcctcggacactgtggtgtctccagtccccaccccaggtcaggaggccagcttggtctaggaggagaggctggactttggagggtgggtgtgagtgccttcgctgaaactggccccagccacccagtgggcagcatgacagggtgaggctctaacactgccactttctgcatcctattgtaggtttttctggcattgtctgcccagctgctccaagccaggctgatgaaggaggagtcccctgtggtgagctggaggttggagcctgaagatggcacagctctgtgagtttcgttcttgttgcccaggctggagtgcaatggtgcaatctctgcttgcttgaacctctgcctcctgggttcaagtgattcttctgtctcagcctcccgagtagctaggattacaggcaggcgccaccatgcccggctaattttgtatttttagtagagatgaggttttactgtgttggtcaggctggtcttgaactcccaacctcaggcgatccacctgcctcagcctcccagagtgctgggattataggtgtgagccaccatgcccagctgcaactcttctttttacctttccttttccctttatgtgcttacatctgtcatttctaacattgacattgtcaaggttgagaacagttatgcactgtattgtactccttactgctttgtttctttctttatttatttttttgagacagtcttgctctgttgcccaggcttgagtgcagtggtgcgatcttggttcactgcaacctccgcttcctaggttcaagctattctcctacctcagccttccaagtagctgggactacacgcgcctaccaccatgcttggcaaatttttgtatttttagtagatatggggcttctccatgttggccaggctggtctttaactcctgacctcaactgatccacttgccttggcctctcaaagtgctgggattacaggtgtgagccactgcacctggcctgtatgactttattttaatacttgaaagttaatgggctggacgtggtggctcacacctgtaatcctggcactttgggaggctgaggcgggctgatcacctgaggtcgggaggccgagaccagtctggccaacatggtgaaaccccatctctactaaaaatacaaaaattcgtggtggcgtatgcctgttatcccagctacttgggagactgaggcagggagaattgcttgaacccgggaggtggaggttgcagtgagcagagatggtgccattgcactccagcctgggtgacagagggagactctgtctcaaaaacaaaacaaaacaaaacaaaacttaaaaatggttaggcactgtggctcatgcctgtaattccagtactttgggaggccaagacaggaggatcacttgagcacaggagttcgagactagtctgctgggcagcatagtgagacactgtctctaactggggggaggaaaaaaaaagccaggtgtgcggccacgtgcctatagtcccagctactcgggaggcaagatgggaggattacttgagcccaaaaggttgagattgcagtgagccatggttgcgccactgcactccagccagtgcgacagagcaagaccctgtctcaacaaacaaaaaccctcaaaatttttttaatgctactaatgtagtgagtcatattaagtgggattatacatgtaccaaacttattttttcttgagtgacattatttcatggttattttaatttgcatgccttatgattgagttaaattgatgatatttgtcacatttttttttgcaaactgcctaccagtaccctattttgggtactttgcagcttcaaataacaaaaattttaattaaaaatggcttaaactataaataaaatttacctcacatgactagaagtccaggtgtaattcaatggctcaattaaattgtcacggacctagatggttttcattttcctgctgttttatactcagcttgttgttgatagttgctaaattaattcacttaaataatcatttagcacctacaatgtattaggcaatattctataagcacaggaaatacagcagtgagcaaaacaaagttcattgccttccttcacggagctgatattttagtggggataagggagaagacagtcaaacaaataggtagaatttataggttgtcagaagacgttaagttttatggaaaaaaataaagccatggaagggacgggaagggctgggttggattattttaagtggggccatcagagaaggcctcagtgagctgatgtttgaatagaatcttaaaggaaataagaatgcaaaggcaatcatttggggaaagagtattgctgatgcagggaacagtgagtgcaaaagccccaaggcaggaatgtgcttagcatgttcatagaactgaaagggctaatgtggcaggagctgagttatggagaaaacatcataagagaagtagcatggggagtcagattgtgcagggccttgtagaccattgtgagatcttttgacttttactctggattagatgagagtcctttgggggcttttgagtggaggactggctttatctgaccaagactctcaaactctcatgctggctgctgtgttgagactagaatgaaggagatcaaggaagaagcaggcatgttagttaagataatattagcagggtgacagatgatttgaagcatgataggcatcagagaaatgttgaagtaattctgcatatgttgaggcagagcccaaaagatttgttgagggatgtggcatgtgagaaaaagaggattcgtagttcacaccaggttcaatgaccagtaaagatgaagtatatttgttcatgcacatctattttatttggaattaaaaacctttcctggaagcccttagcagattttttttttctttttttgagacggagttttgcttcttgttgcccaggctggagtgcaatggcacgatctcggctcactgcaccgcatcctctgcctcccgggttcaagcgattctcctgcctcaacctcccgagtagctgggattacagttgtgcaccaccatgcccggctaattttgtttttttagtagagacagggtttctccgtattggaacaggcaggtgatctgcctgcttcagcctccgaaagtgttgggattacaggcatgagccactgcgctcggccaacagatttttttcttaaatcccatcaaccgtgactggtatccatccatgtcctaggtacaagtgagggtgagagagcaaggatgttcctttcagccatgatagtgggaggtgaactctgtaaggaacaggttgtgagtggggagtggctattggttaggtaactaatagtctatttgtcattgcccatttttctgttaagttgatcatcctttttaaatgatttgtaaataatttttgcatgctaagaaaataagtatttgttatataattctagattctaaatattttgaagctgtaaatgaggttttaaactctgagatcagttttctaattttgaaataaagtgaatctccattgaaatttacaagtaggggctggtgattgcagagtccaatgcataatttatagtttttcctattctgggtgctgttgcgattttaacctgaatgccaggtagttatctttataaaactatcatgtgtgagttatagaggtagcattggggtggtggaaaaaaacacactgtgcctctatatgtgcagttttgccagaggcaatttttattcttatatttatttatttatttatttatttatttatttatttatttatttattttttgaggtaggatctcactctgtcacccaggctggagtgcagtgatgcaatcatggctccttgcagcctcagcctccctggctcaagtgatcctccctctactcagcctccacagtagctgggactacaagtgcataccaccacacccggctaatgtttaaatttctactagagacaagatatcactatgttgccctttcttccttcgccaaagaaagctgataaactggcttattatataacaaggaattctcattttattctatttatattgtattcttattctttaatttcagtgatgcaaagcagtgttttttggaggttttgagtgtgagctttctcatcagacactgaagtttttgagccttaactccattacttaattagctgtgtgacccacaccacttcattgtacagctccgttcttgtgctggggagggcattcacacaaaatacaatgaaattgtgctttctggtggttctgatgtggctttaggcaagttcattaaacactgcgctttcaataagataatgcatgtggaatgctgagcacagtgcctttaagacacttaatgggatatgagaacagttccatagcccttcatttttaattttgattaagagttgtttactaataactaactgggtgagttataaatggagaagtagggtcactgtgaagtggctatgaaatagcacagaggatatatttaaaaagctgtatttttactacatattttcaaactacatatttcattttagtttggagaactttactgaagaataaagaagtagtagtatgtgagtttggatcatttctatggttaggtggtggctgcactaaggcctttccaatgcttagtcctgtgagaggtagatagcgttgtggggggtaggggagaacagataaatgagatacatttatatttttttgcatggtaacttataaggcattgccaagagagggaattcattggaggcaaagaaaaatataaaacatagtgtatatagggctttgtagcatccgtggtttcaggcatttatgggagccaggcaggggtggggtatggggttgaaatgtatttcctatggataagcacaggactactttataccacttaatccaagacccttttgctggtgaggaatccagcatttaaatttatgtatgtatatgataaagctagactttttccagatctgagactcaaagctctttgtattttcatttatactccagctcttttgaggagctttaaagtctagttacaaagacaggaaaaacaagaacggacatagtggctcacgcctgtaatcccagcactttgggaggctgaggccgagaccagcttggtgaatatagtgaaaccccgttatcaactaaaaatacaaaaattagcccggtgtggtggtgtgtgcctgtaatcccagctactcaggaggctgaggtaggagaattgcttgaacctgggaggcagaggttgcagtgagctgtgccactgcactccagcctgtgtgccagagactctgtgtcaaagaaaaaaggccgggcacgcggtggctcatgtctgtaatctcattgctttgggaggccgaggcaggcagattacctaaggtcaggagttcgagaccagcctgttcaacatggcaaaaccctgtctctactaaaaatacaaaaattagctaggcgtggtggcaggcaccataatctcagctactcgggaggctgaggcgggagaatggcttgcacccggaggcggaggttgcagtgagctgagatggcaccagtcagtgcacttcagcctgggtgacagagcgagactctgtctcaaaaacaaaaagcaaacaaaaaacaaacaacaacaaaaaacctaggaaaaacatacatgcaacagaatgttaaagacgagattctaaggcttttttttttttttttttggagacaatctcactctgtcgcccaggctggagtgcagtggtgcgatcttggctcactgcagcctccgcctccctggttcaagcagttctctgcctcagcctcccaagtagctgggattacaggcgcctgccaccacgcctggctaatttttgtagttttagtagagatggggtttcaccatcttagccaggctggtcttgaactcctgacctcgtgatccatctgcctcagcctcccaaagtgctgggattacaggcgtgagccgctgctcctggcagagattctaagttttttgagaatagtgactgtgtttcttgggtcatggctctatcttatacatctggcacagtgtgtgtgtgtagcaggtgtttaatatttgttaaacacaagtggtccttaatatcaaacagcatgggatttaagacatgaacttaggtttgagtctcagcactttcacttcttagttgtatgaccttggccatttaatctctttgatcttgaatttccttatccgaaaaataggggacatactaattaacatctattgtgatgggttgtaatgagaattaaatgataatgtgtacaaaatacctaacttgattggatttgtggtacgcagtagctataatgaccattttaaccccaatatgagaaggattcactcatcacactgttgtatacttcgtagctattacttctttaatccccaaggacttaacaaagtgttcttcagtttctacttcccagttcctttgtggaactggtaaaaatttaaaatatcttaacataatattttatttcaaatgataaactgtaaggtaaaatgcggtttttcttggacaacaaatggtagaatgatgtctagaatatttagttatgtcatttaatactttttctctttaccatttttttaaaaaatattttattttagattcgggggtacacatgcaggttcgttacatggctagattatgtaatgccgaggtttggcctgctagcgcagccatcatccaaagtgatcctagtacccaataggtagttttcaacctgtgtacctcctcttctaccttctcttttggaatctctagtctattacttccatctttatgttcacatgtactcattgtttagctcccacttagaaatgagaccatgtggtatttgattttctggttctgagttacttcttttaggacaaaggatgaaaaagaatgtagcctccagctccatccatgttgctgcgaaggacatgattccattcttttttatggctgtatatttttaccttttttgtgagggggagaggatttaaatatggaccagcataatgaagaaaatatctgtaatcccactattcacataacccctgctagtttaaaaaaagttcatgtaggctgagcatggtggctcacacctgtaatcccagcactttgggagtccaaggctggaggatcacttgagtttaagagtttaagaccagcttgagtaatatagtgaaacatcatgtctacaaaaaataaaaattagccaggtatggtggtgcatgcctgtagtcccagctacttgggaggattgcttgaggccaagagttcgaggctgcagtaagctgtgattgtgccactgcactccaccaggcatttaaaaaaaaaaagtaaataattagaaaatttaaatagtgtaaaccagagtcctctcctattagtttgctagagttaccgtaacaaaataccacaaactgagtgacataagtgacactatttttttttttttttgagatgcagtctcactctgtcaccaggctgcacgatctcggctcactgcagcctcggcctcccaggttcaagtgattctcctaccttggcctcccgagtagctgggacttccagcctccagaattgagaaatttaatttcttttaattttaaaaaattaagagtgacacttggccgggcgcagtggctcatgcctataatcccagcactttgggaggctgaggtgggcagatcacgaggccaggatatcgagactatcctggctaacacagtgaaaccccgtctctactaaaaatacaaaaagttgtttgggcgtggtggctcatgcctgtaatcccagcactttgggagtccgaggtaggcggataacctgaggttgggagtttcagaccagtatgaccaacacggagaaaccctgtgtctactaaaaatacaaaattagctgtgcatggtggtgcatgtctgcaatcccagctacttgggaggctgaggcaggagaatcgcttgaacccgggaggcagagattgcagtaacccagctcacgccatcgcattacagcctgagcaacaggagcaaaacttcatctcagggaaaaaaaaaaaaagtctaagtagtcccaaaaacataaaatttgagcctaaaataagaactgttttaaaattttaatatattgtgttttttcgccatgtaatcccaggtattcttcaggttagaactcagtttcacaagaaggggtgtgcttggaaaacttaccaaaatctcctgattagatacttttttcgtttgtttctgtttttttgagacagagtctcgctctgtcgcccaggctggagtgcggtgacacaatctcggctgactgcaacctcggcctcccgggttcaagcgattctcctgcctcagcctcccgagtagctgggactactggcacacaccaccatgcccggctaatttttgtatttttagtagagacagggtttcaccatgtcgaccaggctggtcttgaactcctgacctcaggtgatccacccaccttggccttccaaagtgttgggattacaggcgtgatccacagcgcctggccagaacatacttatttagcaggtgtggatatgtgtatttaaacagacttgtaaatagatgtataaatgtatacccataatgaaattgatgaaattatatatatatttatatattcattataaggggttacatttcttcccccagcctagaaagcttcactacataacatgattatgtgggagtttgagagttggatcgctttgcattactgtaaatgatagagctttattttaaagtattttttattctaaaggtatatgtgcctttcataaattcaaattctaacaaaaggtatacatcacaagttcagttttactccccagaggttatcactggaaactttttttgtatatttttccagatgtttttggtttgtagataagacatgtttgtacgtagaaaaaaaatacagacataggcatatatgttctttgaaaacaaatgaaattaggccgggcatggtggctcacacctgtaatcccagcactttgggaggccgaggcgggtggatcgtgagatcaggagatcgagaccatcctggctaacacggtgaaaccccatctctactaaaaaatacaaaaaattagccgggcatggtggtgggcgcctgtagtcccagctacttgggaggctgaggcaggagaatggcatgaacccgggaggcagagcttgcagcgagccgagatggcaccactgcactccagcctgggccacagaacgagactccgtctcaaaaaaaacaacaacaacaaaaaaacaaatggaattatactataaatactgttttgtgccttacttttttttggcatactagtatatgttatacatcttttcataggtatatcatgattaatgtaggtgcagttcagtaatgattcaaatgaagttttcattatattctatttttgaaaaattaccaataactacatatataactgaaatcacattatgtaactgtcagtataaaggaatggctcaggtaaaaccaaatagaagttgtatatttaatattttaataatttttttaattaaaaagttaaaacttgtactacatggctatttattagggtaaggaagtatgatctctttaacgtacatggtattttaaaaatatcttattctggtgtgtcttcttgattgtaaaaccccacttaacattttgggcttctatttatatctttttactttaaagtaacactattctgtggttattcttgtggcatattaaagtgatattttaaggaatacttaaccaaattctatataaaatgtatctactctaagttagaaatcttggtgcccttactggtcttatgatcttggaagtcacttaagatcctgagctctgtgttaagccagtgctggttcaagttctggatctaccattgaataattgaccatgacttctttatacttcagtttccccaattgttgaataggaataatgattgttgtgatgagtccataaaaaatacagtcttactgactttatggtggccgaaatttcaagagtaacacagtaacagttaagtcatactgggactcaggctaatcttttctccgttgccctaggcattgatgtccccctggcaaatgagggtgagaagcggtgagggattgcatgggaggtttggggacaaggcctgagagtagtaaagaggcatctttcacttttgcccacatttcattgtccagaccagtcatgtgaaagggaagctgggaaatgtagtttagccatatgccaggaggaaaaggaaacgctttggtaaatagccagtttttgccaccagtgctaagcacagttcctggaagatggttttcaagtcattaagcaagtcacttttcacctctccaggtccgtgtttctttctgtaaagtgggaagggggatgataatgaaaacttctatgaagcatgttttgggagaactatatgttataaccatcttaactcacttaattcttacaaaagtcctctgaagtaaagactattattgtccttttttttttcttttttaacagctgaggaagctaaggctcagagtgagtcatggacacaggatttgaacccaggcagtcttttctgtagggtctgtgcttttatttatttttatttttattaatttttttttgagatggagtctcattctgtcgcccgggctgggtgcagtggtgtgatctcagctcactgcaacctcacctctcaggttcaagcacttctcctccctcagcctcccaagtagctgggattataggcgagtgctaccacgccaggctaatttttgtatttttagtagagtcggggtttcactgtgttggccaggctggtcttgaactcccgacctcaggtggttcacccgcctcagcctcccaaagtgctgggattacaggcatgagccactgcacctggcctcaggcataatgtgatatcatttataaatattagagaatgtagttctaaaaagtgaaggcttaagaaaaacctaataccaccatcatactcaaaaaaaaattgacagttaaatccataatatcatcaaatattctatgttcaggtaaacatgtctcagtttttaaaagtatttgaataaggcttacatattgcgattaagtctcttaatctgtaggttaccaccttcctttttattctcgcaatttatttgttaaagaaatgggttatttgccctgtagagttcccgtagtcaggattttgctgattcctgagattcaataccaggtttatccctgatatttctctattttctgtatttccaaatgagtagttggaaccagaggcttggtcagagtcaggttcagtcttattttacaagactgctttgtagttgtggtgcattctttcatcaggaggcacaaaatgtgattgtctctttttgtgacactagcaactgttggtgactaatgcctagatccgttgattcattaagggttgtaaaatgataatgttctagttgtgttactccttcattttattatctggaatactgttttataaaaagaaaagtttccatcacctcttacttggttgcccagtgtaactgttcatatgagaaaggcagaataaatgtttgcttgtttacctttctttaccagtttccagtatagtcagtaggttcactgtactttccagctgtgattaataaatttttaaaattattatttttaatgtatctgttactgtataggacagtatctggaaatacccaaagacaagatctctaaagaagtcattggctagtggtggatcagtgcagtgtggtgttgatggtggtggtggtggtgatggtggtggtggtggtggtagtggtgatggtggtgatggtggtggtggtggtggtggtggtgatggtgatggtggtggtggtgatggtggtggtggtggtgatggtgatggtggtggtggtgatggtggtggtagtggtggtggtggtgattgtgatgtggtggtgatgatggtggtggtggtggtggtggtgatggtggtggtggtggtggtggtagtggtggtggtggtagtggtggtagtggtggtggtggtagtggtgatggtggtggtgctggtggtggtggtagtggtggtggtggtagtggtgatggtggtggtggtggtggtagtggtggtggtggtagtggtggtggtggtggtggtggtggtggtggtagtggtggtggtggtggtggtcgtggttttagtggtggtggtggtggtggtggtggtcgtggttttagtggtgatggtggtggtggtggtggtagtggtagtggtgatggtggtggtggtggtggtggtggtagtggtggtgttatgcacatgggggataatatagcagaggcattaagcttgaaatcaggaaagagctctggagttatccttgagctgtgttttgaaggttgagtagcagtttgctattggaggaggtagaggttacttttcaggcagagggagcagcatttgcaaaggctctgagatgtgagagtttgttactgaagaaatttggtagggctggaagctcagtgagcttggtgcgagagagtcaagagatgaggctttagagatagtatgggttttaagtcattccaaggaatagttttgatttaactctgaaggccatggagagacattgaaaggttttatccaagtgaatgatggaaggagcaaactgtggaacccttggggcagcactgagaagagcgactcatgatgccccttttctgaactgcttatacagatttgattctcattcttggcattactcctgattcctccttcgtctacatgcacacgcacctacacacacacacaaacacacacagagacacacgtctgcctctcggatctccttctagagtcttagttcttgtttttttcagaatttgggcaactaacaaggctagaaaggaggccatctaaaaaagcgattggtgttgaaaagttgctgctcccgtcctagcagcacaactcttcacttcatagtaatgggagtaatgacgatgatgagtgtggacaactaatgagcacttaactgtagtaccagggactattctcagaattcattagcgtgacaaccctctaaggtagggtctgttatccccgttatacagatgtggcagaaacggcagggagaagttaagtgacttgcttaaggtaataaatgtagtaagaagcagaggtgggattgaacctgaacagtttgcatctagagttcatgctcataacattctatttattgcctttctggttttatgacccccttcttatctaagtgtatgctctgtgccccgcacatacaaactagttcccgtaacatgtgtaatataatccctcctttcccagggtttcccggcttcctatccttccccttagctttctgtcatcagtttttcctaggatttctggttcagcctatgtcaaagtgagagtcaccaacataggtgatgataaatactgtttgattacaggaatgtaggaagatgcgcaagcattctactaaaaatgcttttcccacagatagagtaaaccaaggttgcttaggttttgtaagactgccattcaactataaataggccttatgtatgtttactaaatcagaaaacatttaatatagctaaattttaaataatcaacaacagaaaataaaaatattttgccccaccgtcttaaggttacaaagacttagaggtatattttatttacatgcatgcatacacacacacaaacacacaaacacaaatcatatatagatgtgtagaaaatatagaaaagtagaaaaatgtatacaaatatgtgaaatacattatgtggaatcatgtttgtatttttttagcttaggaaagaaagccattaaaagacttacatgtcaataaccatgatactataggattttagtagttgcagagtattacattacttaaataaatgattcatggaatagtctttttttattggacaagggattttcccctccccctcaatcttttagagttagaaacaatgcagagatgcgtgtctttatagttaaacctttgtacattttataatttacttatgataaattttcaagttgaattcctaggccaaagggtatacagattttaaggactttcaatgttggcagatatcactgtaggataattataccaatttatactcttaacagtaatatatgagtgtatatatttacctattccttgccagttctggaaattgtgaatttaacagaatcttccaaaaagcattgaaaattggcctaggaatgtaaatatccttttcttccccattcagcttactaatgaatctatcataatctcagctgtgtgagtctaaaagagaaccagtaaaattgagataacaagtttattgcaaaataaatgacctgaaagccacaggcattgggtggggtaggagaagggcaggtagtggtgactgaggtgactctgtgtttgggtttttgaaaagattgtagatttgaaggataatgagttcagagaagtagaaaggcaaataggggctgttataaataaggacagtggcatgagccaacggggttatctctcatatttaaagaacatggctagatctggtttccctataagttgattccttactgttattctgagttgaatgcatatcttttgtctcagtgaagcctgaatggcttttgatgtctctgatctggaaaggttgtttgtgtatctcagaataagtcattttgctaaaaaaggctactcctgagggagagcagtggaaaaaagagttggaaaagtggattgtagctagttgaaaaaaggatttgaatgtcaagctttaggaatttggttcttatttggtatgttacaggcaaccatatggacttttgagcaggtgaaaagtacagtattaatgggtagggatagcttgggagggaaggagacatggacattgagcttcagaaaaaccagttagtaaaatgtttcagataatacattggtaatagaaaaagatccattgaaatgtgaggcattcacatggaaagaactggcagaatgtggtaattaacagctataaggaccccaaaataaaaggagtaatcaaacatcactcaaagcttttagcacagtttttgagaacagtgtcagaaggagaagacaactttgttcctaaaagttatattgtaaaataaatgtagcttatacatttttgaaagtgaaatctcaggattcatggtatcattacttctacttgccaaattattaaaatggtgttatatttcttaagatattttaaagcctctattgtagaacagaaatggtagaaaatggaactaatgtttattaacagttactatggaagagggaatagaaatgtgttgctcttgaacaggtttattcaactttggcactattgacatcttgggctagctaattccttgtcacgggcagtatgtcctgtgtgtaggatgttaagcagcatttctggcctccacccactagatatagtagcacacccatgcccctcccctcctccctgcctctgtgacaaccaaaaatgtctttagacattgccagatgtcccttgggcagcaaaaattgctccctctccccagttaagagccattgttctagagtacagaatcagtaccactaaataaatgttattggtgtgtttagaacagtgcctagcacatagctggtactcaaatatttgttgaataaatgagtagtcagattttcattgtgaattaaaaacagaacaaaacttgatgtctgacctttcaagttgcttttacaaaagaaatgggatgtccattgaacatctgttttagatctgatttcccaatctggattattaaaatgaggaggctatttttttcccagtatataaatgattctaatactttttgctgtaaaacttttggagtctctctgctaaattatgttccagtttcttagcttgggattcaagtcataaatatactaggtctgtcttacctttcagtgcttttatttgttcccttttgaacatggctgaattttacctttctgtctccctgcccgccattcttgctacccctccttcctttttccactctcatctttttcccattttccagtctgtaaatcctacctatccttttattttttaaattacaatatctcattctgttacttaggcaggagtgtggtggcacaatcatagttgactgcagcttcgaatttctgggcccaaatgaccctcccatctcagcctcccaagtagctgggaatacaggtgcacaatactgtgcccggctagtttttttttttttttttttttttgagacagagtttcactcttgttgcccaggctggagtgcaatggtgtgatctcggctcactgcaacctctgcctcccgggttcaagtgattctcctgtctccgcctctcgagtagctgggtttatagtcgtatgcccccatgctcagctaatttttgtgtttttagtagaggtggggtttcatcatagtggtcaggttgggcttgaactcctgacctcaggtgatctgcctgcctcggcgtcccaaagtgatgggattataggtgtgagccactgtgcccagcttagttttgttttttttttttgagatggagtctcgctgtgttgcccagcctggagggaagtggtgtagtggtgtgatctcagctcactgcaacttctgcctcctgggttcaagtgattctcctgcctcagcctcccaagtagctgggactacaggcgcatgctgccacccctggctaagtttttatattttagtagagatggggtttcaccttgttacccagctggtctcaaattcctgagctcaggcaatccgcttgcctcggcctgccaaagtgctaggattacaggtgtgagccaccatgcccagccattcccagctagtttttgtagatactggggtctcgctgtgttgcctaggctggtctcaaacccatgggctcaagtgatcctcccattacagcctcccaaagtgctgggattacaggcacgggccactgtgccctgccctgtcttcctttttgaagtctctctctctgtgtctttacttttatacttattttttctctcgtcatgtctttgcccctgtcttttttggagtcttactctgtcacacaggctggattgcagtggcacagttctagctcactgcagccttgaactcctggggtcaagtgatcctctagctcaagtgatcctcctacttcagcctctgagtagctgggactctatgtgtgcaccaccacgcctggctcctttgcccatttttgtttgttttttggagacagagtcttactcttgtcacctaggctggagtgcagtggcatgatctcggctcactgcaacctccactttctgggttcaggcgattgtcctgcctcagcctcctgagtagctgagactacaggcgtgcaccaccatgcctggataatttttgtgttcttagtagagacgggattttgccatgttggccaggctggtcttgaactcctgacctcaggtgatccacccgccttggcctctgaaagtgctgggattatagataggagccaccatggcaggcctcctttgcccattttgaaattgagttgttttcttttctttttattaacaggtccccccccaccctccacacacagtcttgcttgttgccccaggctggagtgcagtggcacaatcttggctcactgcaacctctgcctcctgggttcaagtaattcttctgcctcagcctcctgagtagctgggattacaggtgcctgccaccatgcctggcttatttttgtatatttagtagagatgaggtttcaccatgttgaccaggctggtcttgaactccagacctgtgatcttcctgccttggactcccacagtgctgggaatacaggcatgagccactggaccctggccttaactacatattttttacatctgcacagtgttttggaaaaagtggttcaactgaaagaatgaaaagttgggggcagaatttgctttaaaaaaaaattaaaaaaagggcattgaaaaaagtttcagtggtgttgggagggccttggaacaaggagtgaatggaagatgagggagtggagggaggccatgtatggactctttctacagaccaggctgttgaaggagagagggctaacaggaaatgtagtgcagggggaagttttttgaagatgggagaaagaagacaacttttatatatttcatttcatttgattccttataaatttgtaaggaagatagagcttgtattatgtcagtgaagttgaaaatagagcacagaaaaattaagatacagcacccccaaaactgagaacttctgacataatacactgttggaaatatttatttcagagtgaagaaaatattggaagttaggcttgttaattggtctgcatggttcataattactctttcttattaactatttaaggaacatgagaccaggaagttaaatacccaggtatatgcagatgtatatctagaattggtaccaaagtaaatacaggcataccttggagatactgtaggttccattatagactaccacaataaagtgaatatcaccataaagcaaggcacacaaatattttggtttaccagtgtatgtaaatattatgtttatattctactgcagtctattaaatgttcaatagcgttatatttaaaaaaccaatgtgcatactttaatttaaaaatactttattgctaaaaaatgctactgatcatctgagctttcagtaaattgtaaggttttttgctgatagaggatgttggtggctgctgactgatcccagcagtgattgctgatggttggggtgcctctggcagtttcttacaataagacaacaatgaagtttgctacattgattgcctctttctttcgtgaaagatttctctgtagcacttgatgctgtttcatagcattttttacccaaaagtagaactttttttcaaaattggagtcagctcaaaccctgccactgctttaacaactaaggttatatagtattctaaatcctttgttgtcattcaataatttcacagccttttcaccaggagtagtttccatctttaagaaaccactttcttgggtcatctgtaaggaacaactcctaatctgtgcaagttttatcatgagattgcagcaattcagtcacatcttcaggctccacttctaattctcttgctgtttccactacatctgcagtaacttcctccacttgagtcttgaacctctcaaagtcatccatgagagttggaatcaacttcttccaaacacctgttcgtgttgatattttgacttcctctcatgaattatgaatgttcttaatgacatctacggtggtgaagtctttccagaaggttttcagtttattttgcccaaatctactacaggaatcacttttttttttttttttgagacagagtctctctttgtcggcctggctggagtgcagtggtgcgatcttggtttactgcaacctctgcctcccggttcaagcgattctcctgactcagccccccgagtatctgggactacaggtgcgtgccaccacgcctggctaatttttgtatttttagtagagatggggttttgccatgttggccagggtgttctcgaactcccggcttcaagagatcctcctgccttggcgtcccagagtgctgggattacaggcatgagctgtcgtgcctggctgaaatgtatttcttgaacaataagacttaaaaattgaaattactcattgatgcatgggctgcaggatagatgttgtattgtactggcaggcatgaaagtaacattcttctttctgaacatatccatcaaagccctctaatgacctggtccattgttagtgagtgctaatattttgaaatgaatgttttttccttagcagtaggtcttgacagtggactgaaaatattcagtaagccaacctctaaacagatgtgctgtcatccaggagactgttgttccatatgtagatagcaagcagattagatatagcataattcttaagagctctaggacttttttgagtggcaaatgagcattagcttcaatgtcaagttaccagctgcattagcccctaacaagagagtcagtttttatttatttatttatttatttatttatttatttttaaaagagacaagagtctcgccttgttgtccaggctggccttgaactcctgggctcaagtgattctcttaccttggcctctcaaagtgctggaataacaggtgtggccccagcctgacctttgaagcaaggcattgattttccctctctagctgtgaaagtcctagatggcatcttcttctaatggaaggctcttttgtctacttaaaacaccttgtttagtatagccacctccagcaatgatcttagatatatattctggataacttgctacagcttccatgtcagcacttgctgcttcactttccacttttatgttatgacaatagcatttttcctcatgagccaacctctacttgcttccagtttttcttctgcagttttctcacctctctcagccttcatagaactgaagaaggttagagccttgctgtggattaggctttttgcttaagggaatgttgtggctggtttgatctttcatatggaccactaaaactttcttcatattagcaataagattgtttcatgttcactgacatagtgcttttaattttattcaagaattttttgtttacattcataattggctgaatggtacaagaggcctagctttaggcctttctcactttttgatattccttccccactaagattaatcatttgtagcttttcagttaaaatgagaggcacgtgacttttcctttccctgaattgtttgggcattatatatgacttccgttgcactacagtgtcagagttggttgctgcagagagcacatatatttcaaattgctgctctgcatgctacgaatcacaataacatagttactgtttgtcagtatgtgtgtgtgtgtgggcaccacacatattgccctggcatcttatttatttctctcattaccagtgcatacttacctatcatgttaaaacaagaaaaggagaaaagtggactttatatgtaacactttagaggcatagtggaatgtatattattattaacaaattagatagcaaagcattatatttgttatgctagaagactatggctgtgctaaaagaatataatatatgtcaacattgccagactgggcacttctcacaatattcccaaccaacaggaataaaactaaaggtcagaaaaaaaaaatagtaaattaaaacaaaattttatcacagcagaatttcttctcaaaaacaaaaaatggaaattaggctataattaaagtaagtttttcaatggcttgttagccaagcaaggaaaaccattaccaacagtagttaattaaattatgttttattatggtaaccaaagatgtgtccgtagaaaataaactttaaaaaagactattagcctttcagtgagagtaattgctctaaaagttaaggacattgggagtaatatcaagtcattttggaaagaagggtgaatgatttttcatggttttcttaggcttttgatggatgaataggtgttaccagtactgttcagttgttacatattccagaagtcagtgctgagtttgaagtgattgaagaattagtatttatgcatagtctatgtgaaacaagtacaagagaaaatattttcagaaaagttgagcaaacactaacttagtacaacctgaagtggaatccgctaagatgcgttacagttgatagtggcaaaaataactgtggagcagaaagacttgagttggacaaatttacaaagcttgttaaatgtcaggtgtttaaagcctgattatttattgtattatttattagcaggtactttgcagaaaatatttaaatctgtcatgttttagtgaactattatataatagtgtcagcagtgattttgacttgcatttgtggactttatcatcaaatcctatgaatttttgttagatatagaggcagaatatactgaattgccattatacagagcaatttaatgacttggcagtggtaaagttttatttcagttttttgcgctgaggaatgagattgaaatttttctgaataatattgccctcaactgttaagtcaaatgcttaatagctttgaaagttggcttttcctatagatttcataatattttgtaacaaattcacctaaaattacaaggcagaacagtgattataagtgaaccttatactgtggtaaggtcacttctacaagaataatgaatcatgaaaatcaagagaaagaacaaatagtaggaaaatatcttccaattccttttggcccttcatatttccacctaaactcataagcttttaaaaagataattatttttatttatacttaaaaagataatataggataatatttttgtaaaagagttcttgagatacagcactgaatgtaaagaaaatattggagcattcaactacatttgagaaataacttctgtttattaaaagataccgtaagaatgaaagcacaagccctaatgaatattcctgtttgatactaaaccaaagcttgagaagtggtagtttctcaagtttttcaagtggtttggtgcaatctgaagactgcaatcccatcaatgaactttatatctttaccctttaaaattataatttatgggctgggcgcagtagttcacgcctgtaatcccagcactttgggaggctgaagcgggtggatcacgaggtcaggagctcaagaccagcctggccaagattgtgaaaccccgtctctactaaaaatacaaaaattagccaggcattatagcagtcacctgcaatcccacctacgggggaggccaaggcagagaatcgcttgaatccaggaggtggaggttgcagtgagccgagattgtgccactgcactccagcgtgggtgacagagtgagactccatctcagacaaaaaaaaatatatatatatatatatatatatataaaatttattagactaccttgcaatttcaggggatcttttacccatatatgattttattagattactaagtggtctttggaaaatattgattcactgagtgatccagatagtccaactattcatacggttgtttttgtttgtttgttttgttttgtttgagacagaatctcactctgttgcccaggctggagtgcagtggtgcgatctcagctcacttccatctcctgggttcaggtgatgctcatgcctcagcctcctgagtagctgggactataggcatgcaccgccaggcccagctaattttcgtatttttagtagagatggggtttcactatgttggctaggctggtcttgaactcctgacctccagtgatcccaaagtgctgggattacaagtgtgagccaccttacctagtcctacatatttttaataaataacaaaattcacatttgttataatcgactgatctcatcagaaaagtctttaagtattggaattagttaagcttacattgttggttgtaagtttttcagatcttattgtccactcatgttctaagttgttttccttgaagtgacaggctcactttattcatttttgaagaaatatgtcagataatcaagttttaataattgtggtttgttgttcttacatgtaaaaacagtgttccatgaaaaaagcagttatttcagtttataaatcacatgatcacaaattctttcctcaagaaaaactatggtgtaacaattattttatgctttatttctcgttttgtcacatagataattaaaagatgtgtattcatggatcaagacttaaaacattaaagatttttgctgcttcatcagtgatattctcaatgatactctacattatttttactgtagttgtagtgccagttgagaatgtgacaacttctaatacagcttggtgccagctgccttcagttttggaaatgcatcaacagtattacccaccatagcttttgcaccatgtaacaatttttgcttcaattgttaaacattattttggaaactcaaggaacagtaaagtctgttttattgcccatatttttactatttgtttgttctttcttccttcaggatgttctgagaatccttctttttatcattctcctttctggttcaataacttttctcactattcttttgctgtagttttgtctcatgactaagttttagttctcattcatctcacaatttcttgatttccctttcattactaatggatgtttttgctggatatagaattctttgttgtcggttcttttaggacttgcaaaaatgttatgctgctttgttctggcctccatggtttcaggtgagaaatctgctgtcatttgagttgtttttcatctgtggataaggtgtcatttctcttatttatctcaaggtttttaagtttagtcattagttttcagaagtttatgatatatattagcattgatttatttgtgtgtatcctcttaggatttattcaatttcttgaatctgtgggtcttcgaataattgttcagctgcatcatgttccttttctgagattccagtgacaggaatgttgcatcatttattatattcccacaagtgtctttaatgcctttttttaaaaaaaatatgtatttatttgtttatttattgtcagagttttgctcttttgcccaggctggagtgaagtggtacgatctcagctcactgcagcctccacccctgggtctaagtgattctcctgcctcagcctcctgagtagctggaattataggtgtgtgccaccatgcccagctaatttttgtatttttattagagacagggttttgccatgttggccaggctggtcttgaactcctcacctgaggtgatccacccatctcggcctcccaaagtgctaggatgacaggcctgagtgaccgcacctggccactgtttttttttttttttaatcagttcatttacttctctaggttgggtaatctctcccattttgttgttcagtttagtttgtattttattattgctagcatattttttaattttcaacttggtatttgtttctttcttgatttctttgtgaaactttgtattgtttcctttgtttcaaaattaagtttgtaattgcttttttttttttttttgaggcagactcttgctctgttgcccaggctggaatgcagtagaatgatctcagctcactgcaacctctgcttcctgggttcaagtgattctcatgcctcagcctcccaagtagctggaatcacggcgtgaaccaccatgcctggctaatttttgtatttttagtacagatggggtttcatgatgttggccaggctggtctcgaactcctgacctcaagtgatccaaccacctctgcctcccaaagtgctgggattacaggcgtgagccactgtgtccagctgtaattgcttgttgacgcagttttataatatatagtttaaaatctttgatagataattatgacctctatgaattctcattgtttgcaccttttgactatattttcaaattcctgttcagattttcctggttcttagtatggtatgacatggtatatttggttgaatcctttgcattttaagtgttgtgttatgaagctctgcattttatttaaatccccccttttagtaggatttatctgaaactttgcttttggggtggaggtggggcacagccttgttactactcccaggtgtatgtgaagattccagtttcatagtaggcctttgttgactcactgatggagacgtacacctagtaaatgctgagtaggaatgaaaactctggacttgcattatacctttgtgaataccaccctggctcaaaaggttcctgcttttcacttggcctccactgacactgggatggaggggtggttaagttatcactgagcagtgctttgagtttggattctccagtaggcctctgctgtcatatctctgtagagggagggatagggatatgtccttatcattgggtgggtgttgaactcaggctccccactttttttccacccacactctagagggaggaagccgcgttactgctcagtgggtatgagtgtcctgtgtccccacttggcctgctgtggtatcatgttgtctgtgggtaggagtggggaatggctgactatgtcctccttttaagtctttgcaaaaggtatatggcttggggttttatttgtaccctttggcttaaactggttggttgttgtctgtgagtttttttttcttggtagcctgccgcttccctgcttttttgacaagagacagcagaattttcttggagttttatgtatgtgtgtgcctgttggtgtttctgagttgtctgcttctctagcaacttttcttgtatatatgagtcagaaaggaaacctagggaattcatcctcttgtgtttcttggcacctgaagccctaattggtctgccctctctctacattttgttgtcttcctttgtttgtcttatgtatcacggccaagggtttttaaagctgtatttagtggaaagaacagggaaaagtacattttctgcattttgcctggaagtggaagtctgcatgcatttttgtctttttttccctgaatatagagttctgggatgattatgtttttcttcttcaagcatttaaaagatgttgcattgtttcctgtcttccatggtttctaatgagaagtcaggtgtggtgtcagtatcattattcccatgtatatagtaatgttttgatattctctggctgctttcaggattttctctttatatttggttttcagcagtctgactatgatgtgcctaggtgtggttttctttgtattcatcctgcttgggggttgctgagcttcttgaaagtgtaagttgatatttttcaccaaatttgtgaaaagcttgacttttatttcttattctttttctgtctcatttctctctcctcttcctctgtaactctaattacatgaatgttagtatatttgatattttgtaggttactgagggtctgttcgtcttcttcccagtgtttttacttttagttcctcagaatagatacactattcatgtattttcaaggagatggaccaattttctaccaatctcttgttaagcccatccactaaaattttcattgaaagtactatacttattagttgtagaattttcttttcttttcttttgagacagggtctctgtcgcccaggctggagtgcaatggcgcaatcttggctcacagccacctccacctcccaggttcaagcgattcttgtgcctcagcctctcaagtagccgggactataaggtgcccaccaccacacccagctaatttttgtatttttagtagaggtggggtttcaccatgttggctaggctgctctcaaaatcctggccttaggtggtccaccttcctcggccttccagagtgctgggattacaggcaggagccatcgtgcccagactgaaactctatttaaatatagattttagccaatgatattccgctttttttccaagggtaaaatgtcctcccattccagccagtttttggttatttacaggtaacttcaattagttagcttttacattttcttcagatttgagacattttaggaaagttattctgatattagcccctatgctgttacccaataaataaataaatttatgtgtgagagtcattgttttgttaaggtatattttgcatacactataattcaccctttctaaggtgtgtattgaatgtgatttggtaaatatgaacagtcatgtaattaccatcatagtcaagatacagaatagaccctttacccataaattcgctcatgactttttgaagttactgcctacctcccactccagctcctggcaatcaccgatctgttgctttcctatagttttgccttttctagactaatatatgaatggaaccatacagtatagaatcttttccatctgccttttttttgcttagcataatcgttttgagattggtccattcactagcttacagttaagtttcgttcaatttttggccagtatataaagctgctgtgagcatttatgtaacatgcttcgttgtagatgtatcttttcatgtttcttgggtaaatacctaggactggaatttctgacttgttggaaataatattcttaactttggaaaacagtttcacagtttcttaaaaagtgtctgtatacttttccatttctagagatctgagagttccatttgctgtacattgttgccagcactggatattgccactgtttctaaattttagccatctggttggcatttagtgacaatttattgtgggtttgattttgcattctctgatgattaattagattgagcttctttttatgtctttttttttgccatttgtgtatctttggtgacatgtctgttaaagtattttgtctctaccaccatttttttccaattgatttgcttgtcatcttcttgagttctaagttttttttaatatattattcacagaagtcagttattggagatgcattttataaatatttttgcctaatgtgtgacttgttttcatttatttagcaatgtttattgaacagcagagggtttcattttgatgacatttgtcatttgttaattttttgaagttgaaaaaattatgctctttatgctttattaaaaaatctttgcttgccgcagtgttacttgtaggtttaaaaaatccatttatggttaaattacacatatgataagagaatacgagataagattcatgtttctttgttttccatatgaattatttggcagttccagcatcattctaaaagattatttattgctctcttgaattaccttgaccccttgctcaaaaattaattgaatatgggaaagtttgcctatttctgtattttctgttcttctgacttatttatctctccttttaccaaaaccaaacataaaaaagatttttttttcaaaatcatgagttgatatttatgttttcagtttaattcaatagcacaattacatatctttaaaacaattttatacctgtagctaagctatggttgtatatcttcttttaatatcatctttcctgtaactgaaaaagtcattaaaagaagaaaagattattgtttttgcttcaatttcaaagtaatcaaaactaagtgtactagtattaaatagttaaagctagtagatcaataatgaaatttaatgttattgctttttgctatattttttgagtttactagtgatgtaaaagatttgagttatttgctgtgattatataaatactcttttgatgcataaatcagctgttaacatcatgttaatttgtggcattaataattttactgatagcccttctgtgattctgatttttggcagtggtttttacctggtaagtagcattttgtcagctggcaggtactggaaatctgctttatcacttctttttttaagaaaagtggaaaacacaaacagtttgttcaccaaagttatatttcaaggattccattcaaccagaatctggttcaccttattgactcaacttgggggtatatgtactagatttttacatacatctgtttggagaaactcgttttatctgtgtaatgtttgtaagaccagaagttcttttactgttcttgaaataaaacttttaagaagctgagtattcttctgttagtttcaaatttggactaaaattacaccaaggttttggactaaagaggaagcaaataatctgttcttatgttcttaaaagacatgatttaagtgtatccaactagattcttagtgtgtctgtgtttactcctactcaaatgaaagcttttaaattctttcccactttttgaagtatttaactcttctgtaatatgcagtgttttcttattaactttaaagttgtgttaagcaaacgtgtttaaattaatatttcaatttcaaaaaccctaatttgaaacaataaattttatcattgtatacattatgagcttttaagaataaccaaaaaaatgagggtggatgttttatgtggaagttatgtgtatcccttttctgcttttggctaaggacagataccttagaattagctttatggcgcagtcatctatctgattatttcagttaatatcatcttaatataatacaggttacttgagaagaaaaactcttaacccagtattggagagatgccaggtaggatactaaccttgatagaggatttcatgtgagaaagaaaaaggaaaatattttccattaaaagttgagtttttatctaaaattctcttgattttctaaaaaaacttaatttttctaaaaatatgttgaagaattatatataaaattcactttgctatatatatagagcaagtgaataataggtacacatttctaggaataccccaaatattagaacctatatactaaaatcacatcaggaaacaaataatagcgccccagacattccattcaagcctcctgttggttactattcctaactccccagagacatgcactatcatctagtaacaacataggtgagtcttgcctatgtttgtactttgcgtaattggctttgtacttcgtataattgagctactaagtcgtttatttttctcattgatatatagtattctgttgttaagagtactataatttatttattttaccgttgggcattttgaggactttcaatttgaggtcattatgaattgtgttctgtgaacattgcagtacatttcttttggttgacactgagagtattatggattctaaccccaaagtggctactttcttttcttactttcttttttactttttatttttttgagacaaaatccagctctgtcacccaggctggagtgcagtggtgcaatcttggctcactgcaacctccacctcccgggttcaagcgattctcctgcctcagcctctcaagtagctaggattacaggcgtgcaccaccatgcctggctaatttttgtattttttttggtagaaatggggttttgccatgttggccaggttggtctcgaactcctggtctcaagtgatccgcctgccttggcttcccaaagtgctgggattacatgcacgagccaccgtgcctggttatatgttattttcttacaacctaaataaaaaccattatgtaaacaagacaaaatactcagtacatttccatagtcaatgaatttgtctttattacttgtatataaataattatgaactccttgagttcagttcctttttcatttcctgactctatggacttgaacaaggaaatttaacctctctgcttcatttgtaaaatgaaaaatagtgatatctacctaaagtggtggtggttagatgggaataaagtaatttctttgtttttgtttttgtttttgtttttgtttttgagatggagtctcactctgttgcccaggctggagtgcagtggcatgatctcagctcactgcaacctctacctcctgggttcaactgattctcctgcctcagccttccaagtagctgggattacaggcacctgccaccaggcccagctaatttttgtatttttaatagaaacgtggtctcgccatgttggccagggtggtctaaatctcctgacctcaggtgatccacccacctctgccttccgaagtgttggcattacttgcgtgagccactgtgcctggcatagatgggaataaagtaattcttataaagtacttggcttagctgctggcaaataataatgcttactgattcttgcatattacccatagtttattggctaactttatgtcttccttaaattatgaaattctataaagtatccttgtctattttaaaattatactcatttttataacttacatgctttatttgtatatatccaggatactagatatttgtaatccaaattggaggttattttttgtcatttgatttttttttctgtaatgtgtgttctcaccacatagaagtttttacatttttatgtagtcagatttattcatgtttttatttatggttatgttaaagattatagctattagggacctatttcttcagggtttataatttatgtatgttgttacaaatagagaaattactttttctttgacccaataggtagagggcacttttgtggactcagaaagcttgcctctcctattttattttaggaaaatttctgagattctgcctcctcatttccaagccagagtttaaaatatttacatttttacttcatagtgttaagacattgtgtaatgtaagtataatgtgtaaaaaaaaatcttaaaaatctaatagtgatttggcagagaccaaagcatggagggccttgaaatgctgctctatttgttatctattattataaagcaactaccataaacttaatatcttaaaacagcacccatttacttaggtcagaactcagggcaggctcaactgtgctctctgtttaaggtctcacaggattcaaatcaaggtgttacctgggtggaggctccgggggtgaatcctcttctggggcattcagatgtgggaggaattcagttctatgcagttgtagggctgagctcgccattttctttttcttttttttttttttttttttttttttgagacagagtcttgctctgtcgcacaggctggagtgcggtggtgcagtctcggctcactgcaacctctgcctcctgggttcaagtgattctcatgcctcagcctcccaagtggccgggattacaggcgtgcaccaccatgccggctaattttttttttttttgtatttttagcagaaacggggttttaccgtgttagccaggatggtctcgatctcatgacctcgtgatcctcctgccttggcctcccaaagtgctgggattacaggcatgagccaccacaccctgctgagctcaccattttcttactgcctattggcttgggtcactctcagttcctagaggccactctttggtttttgctcctggctctttttatcttcaaagatagcaacagtgtattgaaatgttcccttgctatgaatttcccttttgctactagctggagaaaactccagctttcaaagaggttatttgattagattaggcaaatctcccttttgattaatgcaaaggcagttgattggtggctttaatcacatctgcagaattcctttgccatataatatattaatggcattatccttgccatgatatttcatcatatttacagcctctgtattagggtaggaaatttggtggggttggtggtatgtgggcattttagaatactgcctaccacacattctgtattgaggggtttgcgtgtgattcagaatatatttgtattcctttagaaagattgctgtggaagcagggaggaggatgtggcagaaaggaaagatactggcaggagaaaaatcccactcttagcagtctccattttgattttgtaatgtcgtttgatgttatttaacagatgtttcaatcagaaatgtgtgtttaatagtatgccaactagaatgattaacctggaccagaacaagagtcataagccagtcattgaactgttcattacttcaggtcaattcatatacagaataatttcatagattaggttttatttcagtcagctttatttcactttctaaagtgaagagttgtttaaacctcggatctcattaacagcattttaataaacacagtattagggtgggtttacttccctagatggcgaatctcatggattatatgttgattcttattggcttaatttttgaatcgggcattatttattgtaattctttagtcttacagttttgcatgtttgaagctatatttttttcctctgaataccacatttgccacatctcagagatatttttgatgtttcttaatcatttaaaaataatacatgatttttcttcttgattgaaactctgccgttatatagaaaggacttttaaattttgccagtggatagatttgggagtttatccttatattatgaatttctaatttttattgtattaggtctagggacgcatctgcttttactggatataacctaggaaatacctgctttttaaaatatgtggacatttctttatgaccatacatgtgaagtttttttgaaaattctatgtacatttgaataggatgttttctctatttttggaattcagagatctgcgtgtattttatgtgtctgtttgaatcaaaaccgatcattgttattatttatttcatatctacttaatatcctcatttgagagctatgttaaagtctaatctatgcatgttatttctactcagctttactttctatatgtgacatatatttattaggtgtataaactaatgactatggcttcttttggaatttacactgcaacataaaacttacgttattataaattatctttgacttgttcactgctttttagtttaaattctgtttctttgcaattattgctatacctgcattttttggatagcgtttgtgttttttcccctcaagtctgtttttgaattgtgtatgtcactgtgcattgtgcatatgtatgaatatatatgtatgtatatatatatatatacagccgctcctgtgttgctgtaaagaaatacctgtcgctgggtaattgataacaaaaagaggtttaattggctcacgattctgcagacagtacaggaagtgtggtgctggcatctgcttctggtgagggcttcaagaagtttgaaatcatttagccggttgcggtgacaggtgcctgtaatccctgctactcaggagactgaggcaggagaatcgcttgaacctggggggcggaggttgcagtgagccgagatcgggccattgcactccagcctgggcaacagagtgaaactctgtctcaaaaaaaaaaatagataataaatttaaaaaaaaagtttgaaataacggtggaaggagaaaggggagcaggcatctcacatagcaagaacaggagcagaggagatgggtggagatgccatacacttttgaacaaccagatcttgtgagaactcactcgttatcgcaaggacagcaccaagccatgagggatttgcccccatgacccaaacacctcccataaggccccacctccaacatcggggattacatttcaacataaaattttggcggggacaaatatccaaagtatttcattcattttatattatatatgtgtacacacacacacatacataaatgaagtctgtagtatagttacatgtaaaatatgtgtatgtgttaagtagtatattttgcatattttgaaagttgctgtcttttactagagaatttaaactatttacatttgttatccgtggacttgaatgttagcttaacagacattaaaattttggttttaaataatttcttatagacctaggaaaataatgattttttggggggtttctttttaattcagtattggtaatgagaactgatgcccgattcttctttttttgtaatgatctgttttcttttttatgtggctccaagaattttccttttatccttgttatttcaaactttctgggaagtttttacctgaagctgccattcagggagtttaaggaggcattgttacagatcaagagtgagtatttttgtagggatacagagataagtggaacagtgataatgactctttgggttttagattcctcatctgttgaatgaggattatgcttaattaaatgttagcttttattattagatatatacataacttttcctttagaattttggtgattataatccctcctattttctccctttctggtactcatataaaacagacgttgcaccttctggatcagattttcatgtcattctacctctttctcttgctttccatctttgttctttattactgcatcctgggagaatcctagttgcctaacactaaaaacagattggtgaagattaaaaacaaatttggagcatggggagccttacaatacttatttattggagcacgtagcctaaaaccattgctatagttggtacagaataaatactggataattaattaaatgaactgtggaatatttaacttcttggtatttttttatgatacaactttaatctcagaaattttgttcattctgttgtgttttatagatacattttgacagattatttcaatctattaaataaaagttttgaaaattcctcagactcattcttaaaattggtaatatgagttctcactgagtttttgttgttcttattgtgttcttggattaatatgggaaaatatttataacatgttactttttttccttttcttactccctgtctttttaatgacgaataaaagtaaaaagaaaaaatgctgtctaggaattttctttattgattcaaataaaccatttagttgataaaccatttaagggctttttttttttttaatttttatagacaggttctcacttttgttgcccaggctagagtgcagtagcgtgatcacagctcactgcagcctcaacctcctgggctcaagcaattttcccaccccaggctcatgagtagctgggactataggtgcatgccagccaccatgcctacctaattattgtattttttgtagagatggagtttcaccacgttgcccaggctggtttcgaactcctgagctcaaatgatccacctgcctcagcctccgaaagtgctggagttaaaagcgtgagccaccatgcccggccaagagctgtttactttatccctccttcccaaatgttaattagctttgtaattgttacttatgtattatatattacttattatattattaatattttaacttgcttgatttcttttatgtgtagtgtataagagtgttgacatttgagaagttccctgtagaaatctattctttgatattgtctatgattttacaagtcctttttatttggtttaggaagatacattccagactgtgtatatatagtaaacgttttcttttaatgccgagtgctcttcattagctatttaattgtaacatatgggtttgaagcgttcccctaaatgtagtgttttattttccttcttttattcactgatacctttatatgatattgtaaattagtatgttagatatattccagtacttttcgtattagtttagctaatataatatttttcattgcagatatgattaagagaacatattggtgtttctaaaatgagaaagacattgagaagctggtcaatttaaattattttctgttattatatacttacctctcattatattttatctgccaagattatttttagtgcaaaaggcttctgcaaaacttgccatatggtatcaaaataagcgattttagattttaacaatttagcagaaattagttatgctaatgagttgttataaatatttttcaacagattgattgtactttttctttcgacatttacgtgaactttctgtttggacatttagactaccaaggtgttgtatttgcagttaattctgggttctgttaatgcactaaacatatttagataccttgggagttacaatataaaaaattacctgttttgtaaaagctggttattacactttatcaatgaagacaaatattttttctgtgtttctaatacattaatacccttgagtgccaaaatagcactgaaatgttattctgtatacttataaatattatataaaattaaagtgtcacaacagtaattagtgtttatgagttatttagaagcttctcctgcttcagcctcctaagtagctgggactacaggtgcctgccaccacgtccggctaattttttgtattttcagtagagatggagtttcactgtgtcagccaggatggtctcgatctcctgacctcgtgatccgcccgccttggccttctaaagtgccaggattacaggtgtgagccactgggctggccaaagttttgtatctctttcttttcttctttctgattcggccctcaggagtcatttagctttgttatgttgattcaatgcagtagactgatgacagtgaggaagagtttgatagtatgtgaaatacagatttacacataaaacattgaaaacaattataattttaactgctgtagtccctggttaattagcagaatataaagtcagtgtagtaacatgtgaagatatccacagtaatgttagcagggtccaactgtctctgctacgtgaggctccagttatctcagctaagctgtttatgagccacactcacaaacaagatcaccaaaagttaagactttttggtatatgtataggaacacttatctattagggcctgtttgaagcagcatttttggtgctttggatacaaagatagtatggtgcctcaactgaaggatcttggattaggatgagaaaaagataaactgatcatgtaatggcataagcaagtaggtactatgtaacggtgtaaacaaaaatttatgttagatagtcatttcccacagagagatttcatactgtacagtacagggcccatcagactctcttcaaagaaaatgatgctcaaaatggacttgggagaatgaggaagagtttgtgaatcattctaagggaaaactgaataagtaaatgcaacattttacataatttcttctgacttcttatgtgttcacttgccctagactgcccctcttgtttggggcttatttctgtgtgttttaccacttgcaagataatggaggcaggttgaaatgggaaagataccagatgactaatttttttcccccacatttccatcttttgttaagaaatttgaagttgattgctacattgaagtatgtagttttttttttgtgagtctaactatttatgtccctgttaacttataattgatgagtttattttgtatttatttttaggcagggtaaaaaatagtaatatgtctcataaataatatatgttcctattactagttttggtgggatttaaaaactttataataatcctcaatatagaaacctgcccctttaaccatattactatttgctttaaaaaaaaatctttaggttttgtttcaaaaatgcttcacaatttatttttgaaaatataaggaatgaaattctaactttctaatttgaatggaaggatgagttggtagcacacgaagcactaaattgagtaatgtagattttattatttctaacgaatcctttgtttaatattttgcaggttccatttgtttacttgtgatgtacagagttttttataccttcccagcttatatttgaatattccttttcaaggttttataaagagatttctctcctttacccctttcagcgatgtgcattttgtaagcactttggagccactatcaaatgctgtgaagagaaatgtacccagatgtatcattatccttgtgctgcaggagccgacacctttcaggatttcagtcacatcttcctgctttgtccagaacacattgaccaagctcctgaaagatgtaagtttactacgcatagacttttaaacttcaaccaatgtgtttactgaaaataacaaatgttgtaaattccctgagtgttattctacttgtattaaaaggtaataatacataatctttaaaatctgagggatcattgccagagattgttgcggagggaaatgttatcaacggtttcattgaaattaaatccaaaaagttatttcctcagaaaaatcaaataaagtttgcatgttttttattcttaaaacattttaaaaaccactgtagaaagatgtaaatagggactgtgcagtatttctgacttatactataaaattattaaaaagtcaatcagtattcaacatcttttacactaaaaagccatccagttgaagaattagaagacagttcactcaggtgttatttcaggatttacgttaataggaacaccaaacacttctgaaattcttggaaattgtgtatccctgataggtgtgatagaaatctctgctagcaccttttcatgattcatctatcttagtcatctgtaatctgcagttgtgctgtttttctttcttttccaaatagtattttataattcaatgaaaatgtttaaatgcttgaaatttacattatacaggaaattataactctactgttgtatcattaaatagagatctctcctttttcttactatgtgttttcccaatgagcatgtatattttgggatattttttctcctagtctattgaatttccaatcttattatgaaacctccatgatattttattcagtcttttttatgtcacctcttagtcacctaatgttagcttttacctgttccttagcaatgttgataaaagctttttttcctatcttctccaggtctgtgaaacataagtatagctaccccaggcttaaactaatctcaaatacggttagttacatgatcattaccctttatctttgttgagtaacctaatttcattttccattaaaattattttgtgtccacatatgtaatcatatcacccttagtaacctagtgtacagacaaattataggtaaggcaaaccaaaattttaaattatatttaagctaataagggatttaaagttttaaaatgctttagattgtacactcttcaatctggaagagaagaactttcatgcacagcaactgttgtggctactatttatgtactgagttacttcagcaagtgcataaactggcagttatcagagtggattatattctgggtggcctaataaatatactttgtcatctcaataaaacaattttatgtgtatgtaagaatctgaattttattcagccttttgtgtagtcatgctttagacctcagtaaacaacatgcaaacttgtataagaatgttgctctaatattggaacattttattactcaatggcagtgctactttctactgaaaactgtgttctaatagtgtataccttcagttacatgttagtaatcataaatcagtttgtaaaataataaactaaatactgaggtgagataatttgctgttgttgatcatgtatataatgaaaagtttatggcaacataaagctaaaagatatactaaaattatgagtactctgcctttttccaaaatagacttatggagactcataaaaatacataagcaataggataaaactaaaaataagtaaggaaatttggcaatggaaaatttagataggataaatatgaagataatagagagaccccccaaaaatatgtaattccagacaaaccacaaatttggccccataccttttcaacagtcaatacaaagaaggaaatatgagcccttaatctgattcttactatttataacatcacttgatataatgatataataataagacatcccttgatagaatgcaatgaaaaattgtcttaaagtagccaccttgcagtagaaaaataccagtttcataaggctgtttcttatagcagccttcaaactaagtcagtggtataaaatcaaggcctaaatgactaaattagatttctttggtttttttttttttttttttttttttttttgagatggagtctcgctctgtcaccctgcctggaatgcagtggcatggccttggctcactgcaaactccgctttccgggttcaggtgatttctcctgcctcagcctcccaagtaggtgggattacaggcgcacaccataacacccagctaattttttgtatttttagtagagacggggtttcactatgttggctagatttgtctcggactcctgacctcgtgatctgcccgtctcagcctcccaaactgctgggatacagaggtgtgagccatcgtgcccggcctccttggggatcttaaacagtgcattctaactacacagcgttctgacccatctgttaagacgatcataatcttggattaagttccaaggatataatttaaagaatattgcagataggatgttttgtcacctttttaacatcttttataaatatttcttcctatcctaattgtgtgtcatggcagaagttactttttatgcttttaaaatgatactgtcttaaatcatagtgttattatgagggttaaatgaaaacaatgaatggaattcacataagattgtgccttgtatatattaattgctttaaaaagcatagttattttacctcctatctaaagcttaagttatgagaatgataatacatattgagtatatgtattttctgttgcttcctaaagggcagagcagtagctgtgatagttgactgagttaggagtaaggttgacatctttttataaaagttgagaaatttaacaaaatcatgcatctcattataaagaaatccgctaaagagagtatctgtgaagaaggccaagattttcatcaggaaacacttttagggtgctctgtcataggtaaatggctggtcattgttgcaacattgttttcatgatgatacaaggatacgttaaccttgtctggaaattttacactaaaaatccatctaggagatacaacgagatatacttcctgaataggaaaactgaatggtaagaagccagtcatgcaagataagaggaaagaacattccagggagagggaacagaccactacacagaccttgaggagtggacttggcatgattcatgaacagacagcatgtcattttacttggagcatagtagcctactaggtgggggtagtagagacatcatcaaggtgaacaaaggctagatcatgtaggcttgtaagcaagggaaggagtttgggttctgttcggtctgcaatgagaagtttttgcaaggtttaaacatggaaatgctacacatcttaattcaccccctgttcctcaatgtatttactcatcatttagctttaattccttttacttcacttaagctttaactccagcctcttttctttggttatctttgtatttcttgacattaagtcctgctgcttttcttttaccctaaattctgtcagtcctctgacctttcttatctacctgccaatgatacggtctagcctctttggatgacatccgtgatttattttttctttccagagattctcttttatagacaaatcactcagcccagtgtcctgccagtgatgaaaattggcagatgatagggtgtgatggaaattagaaagcaatgctgatttggtccttcttcaattcacactgtatgacagctattttgacttttcttgctgttcaccaatgcttttattcttatgtgttgtctggactttcttaagcaatagtttcatcaagtttaaggatctgtgataagctctgttctaatttaagctcaatgtttttgtcttttttatttatctcttctctttttacagctgtctcttaggaaatgaccttttctaaagatgatcattttgtttcctctcacttttctcctgccataagaaccttgctccctttacttcatttagcttcattgtatgccactgttggcatttcgtgtctacttttgtgtatactcaaatactcatcactttcattgatcactagtaaagtttgctgaggagtcaatttgattagtagtcaagagcctgatcttagaagccaaatagacctggattttactcctctcccctcttaaattatctttagttatagcctgtctttttgctttttcaactgtttaaagaaaaatttcttagttgattattgctttaaacttaatgtctctggcttacagacatgtgtgtctaaatattcatatttaatttctatgatgacaccaaacctatccagtagtattgataatcttcttatacacgacctccataaggttgtttcagtattcccacacatcttctctctgactgggagggttggaaccaacctcatttctttgtgtagtgcttttaaaaataatattgtttttcacataaggcatattaagtgtttttgcaccagatgtattacatggatgtttttctttgactaatttattaccaatgatccatagtaatcagataacacagcaaggttgtcagtaaggaattggtggagatcatcatagtctaaaatgtgatttttgtgacaatgacagttgtcttgttgcagagtgaactttgttgtatataacagtgctgtgcagtgtaaatataatgtgagcaacataagtaatttttctagtgggtatgttaaaaatttgaggaaaaggaaacatttgggaacaattgtagtaaattttatttaattcagtaatccaaaatagtaatatttcaaattttgagatactttttccccattaagattttggaatccagtgtgcattttatgcttactgcatacctcgatttgaactaattacatttcacttgttcagaaaccacatgtcgctagtagctaccatggcaacttgaagtgtcaggggagcaaactctagaaagtttcacagaagcattttagtgttcctaggagagtataatagaaaaatgaattgattatctgataattagtttccgataattagttgagtattcccccaatttttaaaagttttacggtgagcaaaaagagatcaatttttcaatgtacatattttgaaagacaaatactagtactctcttaataatgagaaacataacatcccagttatgtcctttctatcaaaaatgaaccaatttatgatgcttccattgttagattaatgatttattttaaatgcctatcacttaaagagccatttaaaagtgattttagcagtaagtccttcacttaaaatatgttcaataagacttgattcatgttaggcagttggggatacaaagttaaaaaagttaaggcccctgtccttcaaggattcacagagttgtgctgtaaataaatgattatgtaacagaagtttcttgtaagcatatgggtaaaagtaatattcaacaactaaatgggtatttgggtgtggtaataggtattcaggaaataatgtgcagatttttttttttttgagacagggtctcactctgtcccccaggctggagtgccgtggcataaactctagtcactgcagcctccaccacctgggttcaagcgattctcctgcctcagcctcctgagtagctgggactacaggcatgtgccaccacaccctgctaattttgtatttttagtagagatggggtttcaccatgttggcccggctggtctcgaattcctgacctcaggtgatccatccgctttggcctcccagagtgctgggattacaggcgtgagcctctgtgcccagccatgagcagagttttgaaggctgggagcacagcagaaaaactaaatttcaagcagagggaacagaatgtgtaaaagcacacagacatgaatagcatgttatgtgaggtgcatggcagacaacccaccatgaccacgaaatagtgagtggttctgagattcagttggaaagggagataaggacctttttgcctcatacttgaaaattctgattttcttttgggtgaaaaatgaggtattggtggagttttaatttatacagaggttaacaattagatttacatttttgaaagattgttctggatgtgtagaaaatgatttagagaggacgtcagaaccataagtagagatgatttgatgcagaagatactgcagttagcgagacagagtattaggtaggtgcaaaggtaattgcagtctttgccattaaaagtaatgtcaaaaactgcagttacttttgcaccaacctagtatgatagactaaactataaacatataaagaaagaatgatgtgtaggaagtttaatacataagaattgggatctggctggatgtgttgggtcaaagctgagttcagagtcaacaatgatactaaggtttctgcctttatctgttcttgagaaaaatggatgctgtttcgggtttttaaaaaagtttcactttagagcagttgagattgagtgtttagaacacttggctattgagatccagtaagacttgaagaataaaggtttggggtttatgaaagaattctagggccaataatacagatttgggaatcatggtggcattttatggcgtgagagttgatgtgatcacaaagggaaactatgggggattaggaaagaaggaaaaggatgaaatcctaagaaactccagcatttagaaagattgtataggtacaaaagccaacaaaggaggatgagatgaaagtgggggaaaactaaggagaaattaggagagagttgccatgatagaaacaaaggaaaggggcgttttaatgtgggagtggctagcaatgcaaatgctacaaagtgcaaaaaagccaaagactaaatcgggtttcctatgggcattggcagcctcactaatgtagcttcagatgagtattaggtgttaagccagccttcgtgaagtatgtcagaggtccagccagcgtccacattttgaagcctgtttttgtactgccctcaagcgaggaattatttttacatttttaaaagagtgtaaataaaaacaaaaggtctgactttttgtcagagactgctatggctcacaaagccttaaatatttactacctggcccttttcaggaaaagtttgcagactccggtacaaataaaagaaatatatttttactctgtttcaagatgcttgactggaaaagaaagaacgtatgagtcagagagaaattgataggattgaccaaaccttcaaaaaatgggaaaaaggctgagtgcggtagctcacacctgtaatcccagcactttgggagggtgaggcaggaggattgcttgagctcaggagtttgagaccagcctgggctatgtggtgaaacatcgtctctactaaaaatataaaaattaggtgggcatggtggcacacgcctgtaatcccagctactggggaggctgaggcgtgagaatcccttgaacctgggaggcggaggttacagtaagcctagatcgcgccattgctctctagccttggtgacagagtgaaactgtctaaaaaaaaaaaaggaaaaataatggttcatatactttgtgatacttgttaaatacaggcatatttatatatattatcaaaggttggtatgataagcttgactggaaaagaaagaacatatgagtcagaatagtagataggaatgatcaaaccttcaaaaaatgaaaagattcatatactttgtgatacttgttatatacaggcatattttttatacattatctaagattagtatgattttagaatacattattttccttattttgcaatatgcataagtttaactgtatatttgtcagggcagtttatccttatattttctgttttatatggtaaaagaactgttagtacattttcttttaatccacatttagggatggatgatgtccataattatgtggattttaatgcttttacaactagaaattaatatagatgaatatagaattagtatattaagtaatgtgtttgtgtatgaatatgtagcttctgtctttaatgttcttccacataagacattttccagtaatcaaaaaaaagcccttatgtgatttgaatagtctgtttatgcttaagaagcatcttagtctaattgatattaacgtttcttaattttgtctcttgtctgattttgtaatttcaaaatatatttagcattcaaagaaaatgtttatgttacactgcaaagcatttcttagttggtattttccttgtttggttctttgcagtgagcatatattgagcattaattaggtatccagcattatcattggcattaggaatagaaaattaaagaagacctgcttatggtcttaagtagatatagccacaaataattgcaaaactatacgattaaatttaatgtggttacatttagattaaataccctacagtgtttttattgatacctctttctgattagatgacaattcaatgtgaataacttcaaatgtctgaaaggttcatgatgcaaatcctttcaaatgattttactgtgtagtcagaaaaaatttaaattcttatacaacaatttcattgttttactgttaattatagcgaaggaagatgcaaactgtgcagtgtgcgacagcccgggagacctcttagatcagttcttttgtactacttgtggtcagcactatcatggaatgtgcctggatacagcggttactccattaaaacgtgcaggttggcaatgtcctgagtgcaaagtgtgccagaactgcaagtaagttttcatttcaattcaaagctgtgtattgggtttaagagggaccctattactaggcgctaaaagtttgtgtaatataatagaggttgttcatattttggctgtattcattcagagtgacttcatcatacttaaaaaaattactggatattaacgtttatattattttgaaagaagtctaaacaaaactgattttaatcatttaaattgctctgatcttctaaagagctaatttaaatttaccaacagtttaaaaaataagcgatattaacaatttaaaacaagcatgagaagaataaagtagcttgtcttcaggggcaccggggaggggatgtgataggatttaaacctctcactacagacgtagaagaattagagttgagtcaaaacgtcagtcatgtgtttgaatttccattccaggaaggacactttctactattattttaatgtacatctgcatctctctaaaagccaccttgagtagatcctggtcagcataattccaaaatgaaatatgtggcatttacaaatttgtaagggggttatcttttcctattgtatttcatctcttggtcatttctccagtcttttctgtgatttccgcttgcacccccatgattctaatgagcatgataatttggggatgttaccagcatcttcatttacaggctgagaatttttgttgtaaccagcaagaattatgcccaactgccatgatcagtctgtttttattatttagttttataagaaataagcgtcaatatcttagagttacatgacataaataggactatgtaccttcatattttggtaaaaattagataaaatattcagtaaacatttattcgataccttgtatctgcactcagtttcttgggaaggattaaaagagcttgaaggaagagtacttgtcctccaagatctttgcatgtagctgaagagataaaacatgtgactttttatggagaggttgaactgaataataattggaggccaactgacccatcttcctgttgacttctgtttatcccccagatttcattcagagattcctctctcagctcttcttgctttccctgtttttttctcttcccctcctcttgaatttaaaatcatagtatctgaaagtaattatagtcaaaaatctcaacagagataacgctgtaggacaggggcccaatctttgggggcagaagagtgtttaaagaaaggttttaggttttcaattataattcttaataattatgacaagattcgtcttttgaaataattattcagcatttaattgcttaatagacattctaagcacttgaacctgcattacatttaattctcacagtaatgtttattattcccgttttatacctgaaactcagagagctttagtctaagttgtttagtgacacagctagaaaacagcagcctgaatacaaatagagatctgatgccaaatttgatcctctttatgttatatgacagtcttttcaatttgctgtgccaagatttgatctttccacacagtagcacatagcagttatagcgccttcctctcaaaaattatattttaaaagtaaagatcagaggctattcatcttgccttaacccttcctcctttgcaggaatcctaaaatggctagagcaagttaaccataggtgagcattgagtaaagatcaccatttaggagggaatccttatggtagggttacctctgttactatctgcagagacaaaacagatactgaggtatttatgaactgtgcggttcccaggactgatgattttcatgattacttatgttgcaaaacataagtttaaagataagccatcattaatgctatcttactttttagacaatcgggagaagatagcaagatgctagtgtgtgatacgtgtgacaaagggtatcatactttttgtcttcaacgaattatgaaatctgtaccaaccaacggctggaaatgcaaagtaagttgtttacttttttaaatcctctgtatgttttatatggagaacagacaaatcggatatctattcaaatctatacattaccatcagctttttaaaaacagctttattgacatataactgacatacagtaaactgtacactcttcaagataatgaacatagtcatcaccgtcaaagtttcctggtgcctcttggcttgctttgtggctgttcaaacccaaaccctctgtcttcctagtctgctttttcactatagattagtattcacttcctagaatttttaataaaagcttcatatagtatatactcgtttttggtctggcttctttaactcagtgtaattattttgaaatgcatccctattgctgcacagatcagtagtgattcttttgtattactgagtgctggagataccacaatttgtgtattgaatcacctgttggtgaacatttgggtcctttaaaattttgagctattataaaaaatgccgatgaactcattaactaacttcctacctcacttggcttctgccccttcagggggaggcgttcagagccgggttgggggcagtggggtagtggagatagcccttggaatccaaggtgcggtttagcttttaagcttagtcttcctgggctgctggtgtcgcgaggttgagggatggagatgaccctcaggtgctgcatgggcctggagcgggttctccctggagctggagagggcgtgatggcccgtgtgcaggagtggaaggcacagcattgtcattgcccttctcggaactgctttttctagggaggaggtggagggcctgggaaaggagggtgatgtggccagaaccccaggtccctggtgtgggcaggaggtgggagcagatgcagagagattctgtacctgcaccctgtcctcgccagtgaggtttggcacctagaactgcaagcagtattaccaggttctgttgtggtcttcagcaagttctactaggcatctgcctgagtggtgggggttgaggggaggggctttctctcctggggggaaaaagagctgctgggtaactgtgctcagctgtggctacctgggaagtgggacctgagggctgaaggattgtgatgaactctggcctgcttcctcaggtagttcagattccttctcttgctgaatgacatcattggaaaggaaaaactctgctatttgactgatttgtatatttacactcttatcttcactcagttcctctacttgcctttttacttttaatacgaagttgaatttgtaattcattgtctttcctaaggaaaaaggacatttaagactataagtttaccttaggctatagctttgactgaagccaagtttattgtatttgtaactttatgtatgtatataccttagcgaataactttgttttttttaagttgtgctgaagtatgttaatttatgcttacatttcatttaatcagagaatttaactaaggtaggtttcttaaaataaatgttttgatacttgaagtattgactttttaaaggtgtagcatttgtgtttattaatttcatttagttagatgaagtccttttaccttattttttgacttgttgattcaacaagttacaattgaccactattaattgttcctatcaatttatcatatttttaaacaaataacttgtggctgttatttagcaagtaggtcaggccagtgttaatatattgtgttttttaccagtataaaattgttctttattctatgtaatgtgttttttgttgagggatcaggaagggcaggtattttgctttgcctgactctatggccacgtagggtgttagtttaacggttgaatggttatcttttcacatcttattttggattcttttgtgttataaaaatgtatcttttgaaaagcttaatagaggtaactggattgacggttgtaattgaaatgcttggctgttttgaggcaaaatttttctatttttctcttcttttacttcctgcaatgatttataattcagaatctcattttgtgaatgtaaatgattataaatattaaagatataaattttctcccattccccactgaaaataaagtttttattccccttttctctgtttgattcgattaacctagattgtaaaccctgtcacaattttcttgcaaaaatatatttcctctgttaattccaactttaccctcaacctttcagagtcttggttgtgatcctttaaaaataattataaagtttttgaaaccctacatgttggaaagagactgttccttttaggctggctataagaacttggcacagtataatgtttcatattacaaatttttcttttttatactctgaaaacattttcttcagttttttcagtttatgctgtcacgagaaaaatcttaacttgaaaaaatttaatcataatcctttttttcttcctgaaagctttgggagatgtgtgaatccccatccccgcctccaccccccgccccagcacctttttaaaaaaatatatttactttaaaaattaccttctttacactctctaataatatctagtaactactggataatttttgtctcttgctcttaatcttctttattatggttttcattgtcttgagaactggtagagaattctgggtgtctttctcagcttgttctgtctcccctttggtgtgcttcttttcgatttgctctttgtaatctgctattctcttttgagagtgacaggattacataatttctgggaatactattggatacttaatctttttattctgttctatgaaggcactatagtgtggtggttaaaagcttatgctgtggagtcaaactgcagttttttcagttactaaattgatgatctttggctacctgtttaacttccctaagtcagtgtatagaaggttaacggtacttacctcacagggatgttggatttaatgaagtggtatctataaagtgcccagcacaatgcctaacacaaagtaagtacagaaacagttaccatagagtttttcatggattgaaaggtttgtcctttgaaccatttgaagaatgatcatctttctctgctgttgaattcttctgtagttctctctgtagtcttgagtcataatttgctcatttgtttgcatttaacatttgagtgtttactgtgtgcgaacatcactgtagtgaaggctggagatgttggggcaaatcagtgtgcccccgcggggctgtcagtctagtttggggctgctccctggtgagctggagtggggttgatcttttcaggatctttattgtaaaccagtcattgtcagataggtttctttttcctacttttatctcaagaatgtctgttctttggtatgttatgcgtttttagaaagtttttacttgaaaataagttcaaactctaaaagttggaaaaaataaaaataatacccatatcccatttacttagatatatctgttgttagcatttcattatcattgggcatgccctctctcactttctctgtgtgtgtgtgtgtatgtgtgtgtgtctgtgtgtgtgtctctattcccccaaccccctactatttgagggttaattacatacattgtgcctttttaccaccatttcagtatgtatttcttaatagtaggaatattcttaaaaaatcacaatcctgctatcaacttcctaaacttacatcaatgccatatgtttatctaatgtaccagccatattacagttatgtcatttgatctgatgtccttcataacctaccccttcctccaagtaggttctaggatttagtttttgtcattggtatttttgaagaatagagttcttctcgatatacttgtttttttcttttttcaaacagaaatttccccattttgtttttgataaccccttataattagatgagaggcatgcattattggccagaatactgcaaaatgctgatccatcctcagggtatcacaactggaagcacacattattccactttccctcatgagaatcacctggtcaggctgttgcccaatttctattcccccctcccttgtatctaataaagcagtatgtgaggatactttaagaccatgcaaatatcttgcttttcctcagaatttccttctagatttgaaaaacttactccctaggccgggtgtggtggctcacacctgtaatcccagcactttgggaggctgaagtgggtggatcagttgaggtcaggagttcgagatcagcctggccaacatggtgaaaccctgtctgtactaaaaatacaaaaattagacaggcatggtagcgggtgccatgtaatcccagctactcaggatgctgagaccggagaatcgcttgaacccaggaggcgaggttgcagtgagttggactcatgctactacactccagcctgggtgacagagatagactctatctcaaaaaacagcaacaacaacagcaacaacagcaacaacaacaacaaacttactgcctgatgatgccattttaacatgctttcttttggttgcaaatgatgcatttccaggtctagcactcccaccacatttaccagttagccctctgctttcttttgtaagcaagaacacttctttcacatgttaagcttacttactattaatattgactcatgaactcctattatcttcaatcatttacaactcattacctaattattttttggctcaaatagtcgcatacttgctgtcagttgctccttcaagctggcactggtgttctgccctcaccgcttttttgaacatttcatactttttggtgtaacaagatgttacaagctcatcttatacctcccatgcccgagtcctggaataagtccattgttaaataagtaacccagattcctttagtggggaatgggtgctgggtgtgctcattgctactggagggtgtttacttcttcaccctttcagcaggtggtgtcacgaaatacatgcatgtgtatacacttacagaagtttgtccaacctatggcccgcaggctacatgtggtccaggatggctttgaatgtggcccaacagaaattcataaaatttcttaaaacattatgaggtgttttttttttttttggggtgtgtgtgtgtgtgtgtgtgtgtgtgtgtgtagctcatcagctgtcattagtgttagtgtatcttgtgtgtggcccaagacgattcttctttcaatgtgctccaggaaagccaaaagattgaacacccctacacgttatgtatatacacataaatattcatatacatatacataacttagaaataatgaatttataccagcacctccagttcttatccttctccactgagttctttgccttttcattcttgcatgtctgttcttctacaataaaaattctgggttgtagagcagcacatttattcagttgctcaatctaaaaagcaagtctgcttcagtttgctctcagtaatagattttattcccctttttcttagtgatttaattttttaaatatagaaggtattagtatactttcaaaactcaaaactatatgaaattttgctcagaattgtcactgtctcttgtttattacttataccgcatttcccccagcctcttggaagtaactaacttcattgttttctgttttaaacctcctgttatttttcatctaagaataagaggatatattgctctttcagtgaaggtagcatgttgtatatgttcttttgcatgttgcttttttcatgtaataaaatctggaaatcacttccaggcaagttaggcaagttcaagagatctcattctccttttaaacagctgcatagcactccattgtgtatctgtgctatcggttactcaaccagtggcctgtgctttggtatttcagtagtttatgataatttgcattataaatgattttacactccctggctttgtgcatgtgtgtttttgaattctcagggacaaatctgtagggtaaattcctaggattattgcctcaggagtgtacacatatgtagctttgttagatactgtgaaattcccttttttggggcttatggtactttgcattgccaccagagatgtgtgagagaacttttcctacgtctttgctaacaggatgacttgtttagcttttgaatgtttgtctgtcttctgggtgaaaagtagtgtatcaatgtagttttaatttttgtttatcctaagagtgaagttgatcgttttttcatgtgtttaagggtcagtttttatttcttctcatgaattgtctgttcatgtgttttgcctgttattgaagattttggcatttttccctaaatttaagagttctttataagttagggatgtaagcctttatatgtgttacatgatgcagatactttctgctagcttatttggtccttttttttttttttttttttttttttttgcttatttgtgtgagacagtgtctcaccctgtcaccccggccataatacattggtatggtcatagttcactgtagccttgacctgggctcaagcaatcttcctgcctcagcctcccaagttagctaggagttatatgtaccacaaagcccagctaattttttacttttgtagagacagggtctcaccatgttatccaggctgtattatgtgtcttttgactttgtttttattattatttttttgccatgcaaaagtttctttttgtggagttagatttattaatcttcttttgcttctggatttttgagtcatattcagaaagcctttccctacactgagggtatagaggacacagatagtcttctcattgctggtaagcagtatgttcatattgtctgatttgactgagttataagataatgtctttatcccaaagacatttttgcaattgctgtatgtatatacattacagtaactaaatcttttagttaagagattctggaaaagaattgacaatggatctaaagtaggttagtttctcttgaaaggctttttttttggaggggggatgtcatgattaaaaatattttgtactatcagatctgttatttggtagttttcttttatccttacctgtagtctttcaataaagtgggaaagaagatgagatttcagtttggtatcagtttggtatcagaacatgtataggcctgggcaatatagtgagaccctatctctacaaaaacaaaaaaagtatctgggcatggtgacacatgcctgcagtcccagcagcttgggaggctgaggtgggaggaccacttgagcccaggaggttgaggctgcagtgagccatgtttctgctactgcactccagcttgggtcacagagtgagatcctgtttcaaaaaaaaaaaaagaacatagataaatagataaattttagtcactgattggtaaatgaggctagcagtgtctttttactataacttaaaaattaccttgatgagattgagttaaaggtttaacatactggtatcctgatttaaaatttaccggtgactatgtttctgatatctaagtttatagatttcctgagattagtcttttaatttacagacaatgatgaagaacaacgattatatccaaagaatattttggctaggttggcaggtatggttaagcaaaataaatattggtggttagcaaatcttttctgtctgtgcttttgagtctatagtaactttgtcgcatctgggtatctactattagaaaatgcctacacattctagatcagtctttactttttaacttaggtacctcacataacatgattgatcctcattttcttaactaaaaaatgagtatgagaacttttcctgtgtaattttcaatccatttggaagtacttgtgttgtaaaacatgttttcattaggttttctggtgtatggctgattctaatccataaatccttgtgtactttggctttcattcacttaataattgtctgctttgatgaataccttctgatttaagttctagtgtagccaaatgttttatatatctatagttagaaaatttaaaatttgtttgtacattaccataacaaatgttctgaattttgtaatatcatcccaacatacagtgaataccgaattggaaaaacagatttctaatgaggctgatagtgaagaaatgaaaatgtcttctgaagtgaagcatatttgtggcgaagatcaaattgaagataaaatggaagtgacagaaaacattgaagtcgttacacaccagatcactgtgcagcaagagcaactgcagttgttagaggaacctaaaacagtggtatccaaagaagaatcaaggcctccaaaatttgtcattgaatctgtcactcttccactagaaaccttagtgtccccacatgaggaaagcacttcattatgtcctgaggaacagttggttatagaaaggctacaaggagaaaaggaacagaaagaagattctgaactttctactggattgatggactctgaaatgactcctacaattgagggttgtgtgaaagatgtttcataccaaggaggcaaatctataaagttatcatctgagacagagtcatcattttcattatcagcagacataagcaaggcagatgtgtcttcctccccaacaccttcttcagacttgccttcgcatgacatgctgcgtaattacccttcagctcttagttcctctgctggaaacatcatgccaacaacttacatctcagtcactccaaaaaactggcatgggtaaaccagctattactaagagaaaattttctcctggtagacctcggtccaaacaggtagggtgattttaatgatattgacagaaaagatattggaacaattctataaaatcagaaggtatatgtgtagctttggtgtggatggcaactttttctgtcttcagatagaacttcagtgtaatgttgattatgtgtttcagccattattttttaaatgctgttaatgaagaatgccatttattaaatttgaagggatcttatttggaatttcaactcagctgggccataaagatgcaaactatggataatagtttctaatagaaagaactttaaaaattcttttagttctgtgctgcagtaaatatagagcctaaaatacagtatagttttgggtatacagtaactaacatctattatttccttctaatatatttattgatattatttattgtatatatttttaactggataaacatcaacatttatgacaggaattttccatgctggggaatttctcattttggtgtttttattaattgctaactcttgtgggatttcttttttcaagtaggacttatttcagtagtttcatggaaaaaatcttagaattgtactattgattttcagtaagtaaagataaatcttcctgtgtctgctttacatcatgtgcattctaccctttaagaatgagttccatttctaagtgagatttaagtaaaactgcatggcaaaatgaggatactataggtatgaattatttattgttttacaaatttgctactttctgaagtgttttttttaaaattgcaagataaatagtggagaagtgttaattcacaatagtaatttggagttttaagtttcatgattgaaattgcttcaagtgaagttttaagtttcatgatttaaatggattaaagtttggctttttataggaataatatcttgattttaatcgtataatttttaaactgtaaggccaggcttttaagaaaatcatttttaatgtgaaaattagtctcctctatatcaaaaccagatatattttattctctaaagacaaggtacacgaaagggaaagtagttgtcagatgggatttagctgtttctgcatggcaaagacgtgtgcagtaaaactaggccactctttatatatgcctttttctaagtattttccttgacagttatttctgctctaccatgaaaagattttcttctcaaaccagttgttcttttttccagtaagtattttttgttttgttttgaatagttatataataattatgtcattctgactctgaaaagactttagcaatggaaatttgaatctcaagtttacttttggttgatatatttacattctttaaagatactgcttcatatgtattcctgttaaattttacgtatctctccttccttggagacttttgtttcagttgagaaaccaggttcaatacattaggactctctttctgtagactttatgttctgaaatattggggaggggggtgtatttccaggcttattccatcttatatgagccatgtcctagtattttgctgagctgcctttgaattcccaaatccgatgataatctttctatttttctgcccctcttgttactacttcatcattttctgctaatcttgtaagcattttgtaggctgtgttttccctccctccagctttttagttttccaatcttggttttagttatctagcaaacagccttcacttgatgatgaacctgctaatatagtgctgttattagggagagtatgaattgaatagtacaagatagatcttccattggtgaggcacagggaccataacttgcaggaaatattctacagttagcaggaatgtgtatatacgtatattagaaatactgaagttcagtattctgttacatgaatttctttgatattaggcatttctgtattatactgctttttttatttactgttgcttctacatattcttcacatcggggactggcggtaaaataagctgcattttcctagctgtgattgtgatgtaagcaagattctttggtttccagctatttttttgttaaagtcactggcattttcatattttgttgaacattaccaattctttggtctttaccagtacagtaaatactaaccaaagaaatgtagatttactttaagttctgtttcatggtgggcaaattattaagttgattttaatgattttctataatagtattatatgagcttttctaggaattcacttcaaatttaaacgaacattttaataggaaacatctgaaagatctagtttgtgatagctagtgattggattatcagatgttatctggaggtacaagctagccaaccagtagaacggtgagccagtgctgtctaatagaaatatgatgcagaccatatgtgtaattttaaattttctagtagttacacttaaaaaaaggtgaaataaattttaatgtattttatttaacctggtatattcaaaacaatatttcagcatttagtataaaaatgaacaagatgctttatacttaaaacatcagttctggctagctgcattagaagtgctcggtggtcacatatgatggtggctgccttattgcacgatgcaagacaaaacattttgagaaatacaaaaacagcagttccagaattattggtgaaattaaaataccaaaagaattcaagatcgacaaactaagactgtgggtgtgctttcacaatttttaaggactgaagtagaaatattctttttctgttgttcatggaacacattttaatgcagataattgtaaaccatttgttgtggcaacaaatcattcacatcttcaagtatattcagttttaaatatataatccaaataacccaatattggagattttctgaaggtgagatgttaggacacagaaaatggaatttatatctcaggtattggacatccattatgaaatatcaaatcatatagaattatgttcctttaaggaggttagtaattaaaagtttagtttttcgtatttttcctttcatatggaatatttcaggtgttatttagttagaaatatgatgcttattttctttatgacatgtttgagatatatctcaaatgtatgatttagaacctgactacaggaatagtaacacatttttctgatggctgtgaatagaataagattccttttgttttttgttttttttgcctattacaatagatgcaggatttcacaaagatgaggaaaaattagacatgataaggtagaagtaacagacagcaaattggatattgtttcatacaaattgtcctaatgacctagttgtattttctcatcttttattgaagttatatattcataaataatttagtatttcatttttcagcatttaaaaatattttttatttttttatagagatgggggtcttgctgtgtagaccaggctggttacaaagtcctggcctcaggagatcctcccatctcgggtctcccagagtgctgggattacaggtgtgagccccacagcgcctggcccattttcaacatttctataggtatatgtgctttgcaacttgggtttaagaaagtggttattgacactgacacatattgtaatcaactcagtagattttagaacatcaagctaatgaccctaccctagaccaattaaaatgcacttctaggatcatctttaactgtaaccctgaaagtggagtcctgaactagagaaatgtgctacttgtcttactgatttttaaaaatgcattaaaattaatactataaggaatgctctttaaaaatggtggaaaataaagtggaaattttaaatttgtcatattaaatcataacatttgtttttatttctgtcttcagtccatttctctcattgcacaattgtattcccattctaattaggaaattctgagataataatcttaggtcttcttgtatgatttaccctgtatgtatcatcacgtcttatagaaagatattgaatgtaatcacactactatgatctacttcagacaccctcatgttctaattgctttcatggtggtattgaaagtttttattaagcattttatgaaacgtattatttgcagtagatatttctttattttatttttatttatttctttgagattgagtcttgctctgtcacccaggctggagttgtggcacgacctcgctcactgcagcctctgcctgcctggctcaagcagttctcctgtctcagcttcctgagtagcggggactacaggcacacgtcaacacacctggctaattttttttatatttttagtagagatggtgtttcgccatattggttaggctggtcttgaaatcctgacctcaggtgatccacccgccttgtcctccctaagtgctgggattacaggggtgagccaccacgcccagcctgcagtaaatatttcaagaaaatttcataaatggaaacataggtactgtattttgatatctcttggacaaattattagaagtttactttatattataagaagagtactttcagttttaaaagtagccagagaaccatagtgttaaacctaaaaaatacctacccctttggaacaccaagctaacaacacagcagattagaagtaccagactttgcttttagttcacttgtgcttgttgtggtatttttggagacattactgttgctagcactacctaatttgtattgtgaaattattgaaggctaaagctgataataactgttcctgtagttatcaaaacaggattgggtctaatttcttgttctacttgatattgaactcaattttatatatgagacttcttttaataattccctaaagagtgaagtgttggctgctgtaactccagtgtatacaagtgattgtatttaccaaaaagacaaactgtaaactcttttgtttcttttaccagttatcttcctttctgccctctgtcttcattgctttcacttttcgcaaattagacttactgtttataagcaaccttggttttacatagtatgttggaagagtgtggggccggggttgatttaagatttggaggcgtaaagtttgcctttgagacaccaaaccttctatggctgcttttaaaactgatagtactcttgggctgtaagaatgactttgatcgtatttaacaatcagcaatagaatttgacttttaatagaaagttgcttctaaatagcctatcctccacttgtcattattgttctcatttccccatcccacagtccttgtataatttactagcttggacagtttacctgagaaattggcctcaaagcagaaagaaacttaatgctaatattaaactatttttgggttaaattatttttcttaggttcaaattcagtccctgccaggtagtgtttttttagtttctgtagtatttgatagcaagttgattctatttacaacttaataatgattacattaggaactattttgcttttaattcagtttgtagattaaggaggcattatatagattttttagtaatttttagtaacttttttttaagtgaagaaattcaagattctaggttattactggtggaggcattagtgtgtttcatatcatagctcattgtttattgatgaattcatacacacatgcaaaaaaagataatagatgctcagcagaaaaaaagttcagtaagtgctgaacagggtgcttaacgtagcagtggacagaaaggggcatatctttaattacagtgtaaaaagtgctgcaactggattgtaggagaagagcccatacattacaggggcaggtaaccttttctgaatggtttgtgtaaattcttgatcaaagctaagatctgaaggataatttaaactttgataattatagctatattttagttttaaggtctaaggaatatactagataatttgtcagaatatctaagtataatgataatttttcttcagaactataaaattacacaaagtctgtcttttcaaagtgagataaaattttggcatcaaagctaacttttaaattatgatgaataatacataattaccagaaaattcttatttctgaaataaaattattcaacattatttttatcttagagtatgactttctgtctcatattttttagaactgtctactgccaacataatattaaactattgactaaaaagaatttaagatgtatgttagccaaatctcagagaaaaaccaatggaaatattgagagaagtaatttaggtatctcttgccccactgcctaccactaaataaaattacaaacaataaaacgtcctaggtggtgatgcaatgagaggcactaatggtgtggtaagagagatgatggttcactgggagcactaaggaaaggtctcctgatgagaaaatatgtaaggccatacctgaagggttagaaaacgccagacatggctggccgtggtggatcacatctgtaatcccagcactttgggatgccaagcctggtggatcacaaggtcaggtgtttgagaccagcctgaccaacatgttattgctcctaaaatacaaaaattagccgggcctggtggtgcatgcctgtaatcccagctactcaggaggcttgaggaaggagaattgcttgaacctgggaggtagaggttgcagtgagccgagatcacaccaccacactctagcctgggtgacagagtgagactccatctcaaaaaataaagaaagaaagaaaatgccagacatttattgaagggccagaatggtatagtgaagtgttctgagtcagctgggctctgattgatacagagcttggcatgtttgaaggacagcaaggaagccagaatagctggagcatagcagcagggagacaagtgccacaagataagttggagaaaagcactgggaaaggtttgtattttaagtgctctgagaagcaattgaaggtttgaaatagaatagtgacttgcttgatcacatttgtacttttgaaaagttcctctggctgctgtggggaaaggtttgagtagatgcagggtgggagaagcataaccagcagtagactcttgtagcaggttaggtgagagatggtggtggccacgagtgtgctactagtggtggaagtgacaagaagtagaaggattggagacaaaacttgaagataaaaagtcttgaatttgctgatgatttgcattgatgaagtgttgggggagaggcctgaaggagcagaggagagtgacaagggactggatgccatttataaggatggggaagactgggatgaaaccggttaagggagaaattttaaacatggcaaacttaagaagggttttgtgtgagaaaatggaaatgctaagaaggaagttgaaaatcctgctaatttggagatctttgattaaagccagaaataagaatgtgggaagcatcaacttccaagatgccctcattgtagataacaccatttaggatctaggctcaagccctgggaaactccagggctttggaagccaaatagaggaagaacacgtacaggagatgaagaaagattagcgaggaaggcagtgaaatatccacaggtggactgctgccaaatccagcagaaccgtatgccagatgtcaggagcatgagtaaaatgagaaaagagaaatggcttttgacaacacctccctactaatagtagggaagaagacataggtacagattcaagttgattggaaattatgaaagtgaggtaactgacctgcagtggttgctgctcagtgaaatcagcatagtgattacctgagctaggttagagatttgatgggtaagaaagaacacctgagggtaatcctggaagggaaaaaattaagtgtttgctggagagaatgaattggattgctggacttcaatgtgtgtgggttgagttagtgacttaaaaatgaaaccaggctattgcttgtgtggcttttctcaaaatactgttattccattacctatctcttaccccaagagtagtcacattcttatttctggttattttaattcctggtggtatttttatgtgattaatgagatagtacttgttaatttgatgatattctagaaacctggtaagtactatgtaccttaagttttggttacttgattggtaaaattatgcatgcaccattgaattacctaattcaaaatatattcttttattgtttgacatttgtcttgtttttctttaaaatgttatctttgtggagtaaacatttttctttatgctgtttaacatcttcagattagttcagggtattgctgaatgtggttgttcagaagtaaaatgctttagtttcagttatatagattttaataagatactactttctatataatttatcaggcactttaggcattttaatttgcaaatttaggacaatttgctttaacgtttcttcacttttgtccattggatgtaatttccatagagtattcatttccctaaataaaaaccaaaaccaaaccgacaactaatggtcactgaagaaagagtgattaaatgctaagattataatggtatttgcattttaatgttaccagctctctacagtttaaagtttatgcatttatcgattgcttatgtttctcattgcattctttggcctactggttttggttgtttatagctatagaatatagaattccttatggttatccatttctccttttaagtagagtgatagttgttagaagaaaaataaccccccaatactttcttctagtgttaattcttaaagtgtgattgacttttatttactttttggtgcagtaattgcagttcatgagtcaatgttgatgtcacataaaccttaatttttaatgtttcattgtagtgatgtctctgtagcagcaaacatttaagttatttgttatagttaaatgtttaaatcactgttagtgattagcttattttgccttccttgaagcaatttgtcctaaatttccatacgtttgcatttgtttttgctgtcctaaaattccttagttgctggctttgaccttttatgttgctgagttttacacatctattttctcaactgccatatcttaggaggcttggagtacccataatacagtgagcccaccctcgtggtccccagacatttcaggaggtcgggaaatttttaaacccaggcagcttcctggcagtgccatttggagcatcaaagtggtacataaaattacatttacattcatatatcacttctgtctgatttgttttgccctactggatgttaagaattaaatctttcttttctagattgagcttccagaaacactttttaaatctaaaaattttaatgtaaagaaataatatgcttgcatttaaaaatcaagtatacatttttaatacctctttttatggttaattccttttgttgtgattactactggttttatgagggagaagtccttgacatgtagaccaaaatgtaattaaggatcttttcattcatgatacataaaactttgttgcttagaaaaaagcaaaagaaaaaactccattaatttattatgttctcatggacaagaaataccaaaattgtggcagatttcattgtctgtttaataccttaaaatgacaaggctttttcccccatgacattggttgatggctctgccagtccttgaagtgagttaagtagtgtgatgcattttgaagagaaaaaaaattactttgaaaaagtattaactcaaaagttaaaatacttcattgaccggagatgacagttcttcttcatattctatatttaatattctggaatatggctgtttaatttagactcatgaacgattttaaggaattctagattatactttattttctttcatgactggaagaactatttttttaacctccctacctccccctgatatcatccaagatattgaagtataaatatgcctcatttgacagtttgataatatagaccaccagtttttacttaatttttttctgggtcagcatttcatgttggagaagataaattgagagactactgtagtcttgatttttaatcactgacttaatttttcaaaaatcttttataccaatttaataacaaaacaaactcggctgggcgcagtggctcatgcctgtaatcccagcactttgagaggctgagggggcagatcacttgaggtcaggagttcgaggccaacctggccaacatggtgaaaccccgtctctactaaaaatacaaagaaatttagccacgcgtggtgtcatgtgcctgtaatcccagctgctagggaagctgaggcaggagaattgtttgaacccaggagacggaggttgcagtgagccaagatcgcaccatcgcactccagcctgcgcaaagaagcgagactctgtctcaaaaacaaacaaaaaacccaaaaaactaacctgaccccatccgtccgttgtgcaaagaacctgatgcacttctctaaagggatctcaaggagagcagggtaagagaagacaggagtggcagtttgaaactgggagctggctgtatttattacatccaaagggagaaaagccattcctcccattccttttgttcatgtgtatctattttatgtttacagtatcaccataaatttttgacttggaaaccattctgctaaatagggaataagttcatttcaaactatgataagggacatcagttgaagatatgacatattatttaacttatggtgagggaaacacctaagtattttcctgagcatctggataattttaaatatacataattcaactacttaggtaggtgccaggttttttcaaggagtaattaattagtacaaacaagggtgagggggcagggaacaccatactctggtacttaatgtctgaaattatcagggaatttaacacattttcccataggtttatttcttgtgtaagaagtcagataaattatttccatttcaagtatttattattcagattatttaaagcaaagctttcacaaagccttttgtcagctttcctgtaatcctcaaataatttttcctggctggatgctttggcttactcccgtaatcctggcactttgggaggcagaagcaggaggatcacttgagcccaagagttctaggctgcagtgagctgtgatcacaccactgcagtccaacctgagagacagatcaagttcttgtctcaaaaataaaagtaataacaataataataaattttcctctaaatacaacggtgaatgaggtagaaatgttgagttcataagagaactgttgaatagtgaaggaaactgacttaattctaatgacaggaagaatactgtcacacactagcaaaaatgaactttcatgctgatgtagcagtacagaatatgcttccaacccagggacgctggagccaggcttgctagctaagtgaccttggacaagttacttaaccattttattcctcagcacactcatctcaaatgaggataataaaacctactatatgggatggatgagagtaaaaaatacttagattagtacatagtaagtactcaatagatgttagctattactgtaatcaccgtgagaccagttaatgagagagtttttccttatccttactctatattgaatacaatttgttgcacttcgaaatatctggatcaggctacagttgttgtcgtcaccgagaatgtaggagtgggaaagagaaaaatcatgcaaagtcttgctgatagcgttcacagtgacaggcctaaagtatgattctaaggttgtaagcattttatatttagatttttaagttgtggagtatacttttaaagataaaaataataagccaggtcttttaatacttatctaaagaagtgtttgtataacatttaataaaatgttttatctcagtggcatttggatttaaaaattattttgggctgtcacagaatgttgacttttcctaatctgttacatagggccatgggtctggatttccaagaaagcggagacctcgaggtgcaggactgtcggggcgaggtggccgaggcaggtcaaagctgaaaagtggaatcggagctgttgtattgcctggggtgaggcttgcttcatgtatattttctctaatctaaatgtcagttaatgatgaaaatctcatagcaagttattttgatgagtcatataaataggtcaaaatgtttattttactgtcctacttttttttgagcctctggttacattttcttgtatatttactttctcatcctttctcttttcttaccttcctctttgactccttatctttctatgccaaccctctctaaaaagtcattatgtaatatagttgctcttttatttaaaaaattttaagattgatagatatttgctatcatgttatgaagctttatttgtatgtgtattacaaatacatttgctaactactagcaaatattttatgtaataactttgctattttattaaaatcctgtttttaaaattctgaaatgtcattttaagtataggagacagtgaaattgttcaagtttaccactaaaccaggaataaggaaacttagattctcgtccttttttcaaaaagaaaaattttaaaaccaggcttattgaggtatagttgatataagctatatttgacttgacatgtacaattccatcagctttgatatatatatatatatatatatatacacccttgaaaatgataccacaatcatgacagtgaatatattcatctcccaacgtttcttcatgtccctctgtaattttctgcattccccctgccatccgtccttgtccccaagattagtttgcattttctagagttgtatataagtggaatcatacagaactgtatgctttttggactgatttatttcagcacaattatttggagattcatctatgctgttgtatttgttaaccgtgtactcccttttcttgctgtgtattaataaaactgtggatgcaccacggctgtagacctgtgcacttttttttcttctttttttttttttctgagacaggttctcgttctaattcgtggctggagtgcagtggtgcgatcatagctaactccagctttgacctcccacctccgtctcccgagtagctgggaccataagtgtgtgccaccacacccaactacttttttaaaatttttaatagagacagcatctcactatgttgtccaggctggtctcgaacttctgagctcaagcaattttcccaccttggcttcccaaaatgctgggattacaggcatcagtcaccatgccccagcctgtagtcttacattcttgtaatgtcttcgtctggttttggtatcagcataactccagcttcatagaatgaatcagaaagtatattctcctcttcagttttctggaaaagttgtgtagtagtggaaatgtatcttcttatattatacatgaatttattagtgaaaccatcttggcctgaaattttctttgtggggggtttttgttgtgttttcttttttttttctttctttcttttgagatggagtttcgctcttgttgcctaggctggagtgcaatggcacaatctcagctcatgcaaccactgcctcccaggctcaagtgattcccctgcctcagccccctgggtagctgggattacaggttcctgccaccatgcctagataatttctttttttgtatttttagtagagacagtttttcaccatgttggccaggctggtctcgaactcctgacctcaggtgatccacctgccttggcctcctaaagtgttgggattacaggcatgagccaccatgcccaggctggagtgcagtggcgtgatctctgctcactacagcctccacctcccaggttcaagcaattctcctgcctcagccttctgagtagctgggattactggcatgcaccaacatgcctcgctaatttttgtgttttgggtagagatggggttttgccatgttggccaggctggtcttgaactcctgacttcaggtgatccgtctcccaaagtgctgggattactggatgagccaccagtgcccagcctgtgggacagtttttaacaacaaattttatttctttaataggtacctatttaggttatctgtctctccttgcataaatttgcatctttcaagaaatttgttcattttgtctatcttgacaaattaaaggaatggagttgatcataatgtttcttattattttaatacctgtagaatctgtagtgatttcaccttcctcattcttgatactaataatttgtatcttgtcttatatttttcctgatcagtctggctagagatttatcaatcttattgatcttcttgagtcagcctttgttttcatggacttttctctattttctttcccctttctgttttattgatttatattctcatctttattttttcctatcttctcactttgagtttaatttgatcttctttttttgtttactcttacgtgtccctgcttggaagggacacttgtgaagtttaggtcagagctttctgttctccttggcttatatctgtggtctaggaaaatgatatttctatcaccttctggataaatcacactattatctatgcaggcaacaatagcacatattttctctacctttgccctcaagttaggttttatttttctagcagtctaaaggtcatgaaataaattataaaataaaaacagtgggtcttcaagctagatgatactgttttctttcttgcatggacaattattttaaaatattttggtttttctgcacttattatttaaatatgactccccacccccacttgaatctagggacattgtagttttctactgcagactttatttctggtttatactgggaatatattttttatcgttttcagtgaaagcattcactggttaaatttccttttaaaaataataatggatctttacaatttctttgagctgctcagtgtgtataatgtgttgaattttctgtaagtggttgggaggtagaaatagatactttatctctattttagccatttccataattatatatctcaatagtcttgtcaatgcatcattagtcctatgactgaattaatgattacttttagtagtcacttaatttcttactgatgatgatgattctacttctgtgaatcatcttggatgattctctaaaatcttagaaagctaattttgttaatgctatgcatataacacatcaatacattttctctattaaaagaattaaagcgttataggtagatcagaatttaccattactaactcctcagtcctccttatttccctgttaccagtttggtatatttatatattaggttgatccatatgaaattgccaatattatttctgaactgatgaaaagcagcaatttcttatgagtcaacctattatatgtgcccatagactacatataatgacgttgcatgtttttatattatagtgctatacctcaaatactgttctgcaatttattttttcactcaacagtgtctttttgataatttctttcatggcagtctatacaagtttctacctccctacttttaaaatgtttcgtactttcctagtgtttggatttgtcattgctttacttactccctaatgattaatattggcattattaacacttgtagtcattagggttcatatgactataaattgctcttataaagcattagtactatccattaaaactgcttttaggctgggcacggtggctcatgcctgtaatcccagccctttgggaggccgaggtgggcggatcatgaggtcaggagatcgagaccatcctggcatcctggccaacatggtgaaaccccatctctactaaaaatacaaaaaattagccgggcatggtggcaggcgcctgtagtcccagctactcgggaggctgaggcaggagaatgccgtgaacctgggagacagagcttgcagtgagccaagattgcaccattgcactccagcctgggtgacatagggagagactgtctcaaaaacaaacaaaaaaaaaccaaaaaaactgcttttaaatgtatttgtattgaaaaataccgagatgtagtccttctatttagttaaccaaccaaacttccttccttttttttttttttttttttgggagacagggtctcgctctgtcacccagcctgtagtggagtggcataatcttggctcactgtaacctctgcctcctgggttcaagtgattctcctgcctcagcctcctgagtagctgagactacaggcgtgtgccaccatgctcggctgttttttgtatttttggtagagacaggatttcaccatgttgcccaggctggtctcgaactcctgagctcaagcaatccacccactttagcctcccaaagtgctaagattataggcatgagccaccacacccagctggttaatcttctttcagttgttcctcaagaaaagtaattcagttgtgttatgttttgaccttgaacataacctgttgtgtttcaactgtctttccaggcttcgattgtaagctttttaaagaaagaggattgtattttatgattttggcagtgccctccttgtcttcttctacaacttctagttcagagctttattttgtttcataatcactctagaaattattaacaaaccagagggtacttagttgatttaatcaaatagaactaagtccagactgaacaatattggttgataatcatttggctaatactgaaatttggatgttattcaaaataatattccaaagcagtgctaatagaaatataatgagaaccacatatgcaacttaaaacttcctagtagccacattaataagttacaatgagctgggtgcagtggatcatttgaggtcaggagttaagagaccagcctgaccaatatggtgaaaccccatctctactaaaaatacagaaattagctgggcatggtggtggacaactgtaatcccagctacttgggaggctgaggcagggagaacagcttgaaccaggaggcagaggttgcaatgagctgagatcacgctattacactccagcctgggcaacaagagtgaaactcctctcgaaacaaaggttatagtgaacaggcaaaattaattttaatgccttccattttgaccgatatatctaaaatattaccatttcaacatgtaatatgtaattatgtgctgtattttatgtttgcaggacatctcagttcagactaactacattgcagatcccaagtgtgtgtcattaaaatagtgatagatttgtgtgtgtacatacatataatattatcatttatagtttcttgattagaattctgcataatcaagtcttactaagacaggtttattatattttctcattacttattggtctataggaattctacctctaaagagagaattaggtgaataataaaatgtcatgactccattttatagtactatcttagcattaatatttggaattgttattctagaccttagcaaaaatatatgttttgattatgaattttctgaagctttccagttaagtgtaaaacaagtgaaaaatataacttcgtattttgtgtattttgctttttataggtgtctactgcagatatttcatcaaataaggatgatgaagaaaactctatgcacactacggttgtgttgttttctagcagtgacaagttcactttgaatcaggtttgaacttgacaatttactgtcttcctcattgaattcctccttgcacatttctgctttatctcatctacacagaagtgatccaatatttagctatagagctatattagttaagaaggtatttttaaagtaaaatttgtaggtttttagcttagtctccatttaaaatatgttctgttttcttaacttcaggatatgtgtgtagtttgtggcagttttggccaaggagcagaaggaagactacttgcctgttctcagtgtggtcagtgttaccatccatactgtgtcagtattaaggtaaacatccttaaattgagttaacaaatatgtactgaatttttatttggttttagtagtaacatgagctcccagttctcacaattaagtattatgattattaaacgtatgtgacagtatttaagcactttaaatactgcttttaagggtttcctatctcaagaaatttgctcctctataaatcttatattgtactaatatcctgcttttgtcttgaaaaagtaaaacataaaaatatatgcatttaatttaaaagacaatttatactattcacaaagattttaggtttagctgattcattttgtctgttgatttaaaaagctgagaactggagtatttagtaaaaaattattagcctattctgttctttaccgcattctctctcctctgtgctcactcatatacaaaatgacattttctccttatagccaaaagaaacaaaacaagtgtcatatttaatgcaattggtaataatcgagagtcagcactgctcactttcaagcatttcaggatagaggctttctggggaaccttttaagtggtatcgtgtgcttggttttaaatatggacaggtctcaatacttcactagttgtatctaaggttcttggttttttctttttaagaactcagtcttaataaaacttacatatttgaataaagtgtcatggccactggaagcaagcatggaggtatagctgtacagcagaggtcttaaactgtatactccacaaggaaatcttttctagtattgccataccatgtaatataaatactaacctcagtttcaataataggttgtgaaccatgagtgatttttataccattctcccctgcccttcagacatcactgtgttatatcattgtcagtaaaatgtcagtatagtaagcaaatcaacattatctccttcagacttctttgttgataactacactagtatttattttatagggtaatacaggtttttgtgaatttaggaatcaaaatgaaagattgtaattaatactatccaaaatagaagactagtacggttaatttatgtagttttttaaaattagttgctcatggtatgtgactgaaaaacacagagtatataaagccaattaaaaatggagttatatatgcataaaacatgtttcttttcttctttgtactttatattctgtataaaagtagctgctatcattagattttgttttttagaatacttaatgttttggacctaacgaaattgaataagatccctttcaaggtagtaatgtatttcttttaacccatccaacaattaccgaattcccattttacagatgagtacgacttacataagttaagattggacaattagtgcactatcagacacctagttattcctgtttttaaaaattatgtgtggttccttttacacgacactgttttggacagtatagaatactgcagtctcattgagaaatacagcaatatctagaaatatactagggatatgtgaattggctcagcttgcatttttattgcaggaggcaattgtttgtggataagtttgatacctttgaagcttctttttaagcttgctggggcaagtctagaaagccttcactctaaggtggatattttcaaactttatggttttagaaccttaacactctttaaaattactggggacgccatagtttttgttcatgaggattttaactatggactattcagcattttagaaattaaaactaggaacattttgtaacacaagactacagaagcacaacctgtacaatgtcaatgtaatattatgatacaacatgtagcttctataaacaccactgtatcattgtgaataaattaaagtgaaaaaaggcaaattaaatcttagtattatttaaatttgttttaactttacagacccactggggttccctagtccacattttggtagctgcagtcctagcattagtttaaccctatacttaagacttggcctttctgggatcactactgaattctaccccctgttcaccagtgtctttgtactctgactggttgtgcttcacttgtctttgagccttttgcaagctctggtaattgtgcagcttacaaattcccagtagatgtactttcccctggttgtgggtctttgggcttctagaagtacggcttggtgttccaccaaagacttcaggggatcctttgtaggtttctggagctcttagtccttattgcttcttcattttgagtactgtgtcctgcaaattccactgcctcgccttccctaacctcagcgaggccattgattttactctgctgaggttctccctccctgggcagcgttctggaaaatgtttctaggcagaatatcataggactccctgagtgtttccttcctctcagagaccactgtctcctttactatgtgttgtccaatatctgaaaacagttgtttcatacactttgtccaattttctactatcttatgggagaacaggctggtcccatctactccattatcattgaagcatgtatcagtattagattataaaacatatctgtaacaactttggacatggtaccatggatggaatcctggatgacatcttatttgaaaaaacttttaaaactaaggctaaactggttcaatggaagaaaaaaatgatagtacaaccccagtacctaagttaaaaggaaatttcaaagagggagaaattgttgaagcgttgaagtaccagaagtcaagaaacactaacactaatgtttccattagatttgagaataagaaggtcttgacaagcctggcttaagcagttatgagtggatgtgggtgtagagaccagactgtagtgttttgaagagtgaatataagtggagaaacttgagagtttggttgtaaaagggaccacaggtatctgtgaagaaaacttagtaggaatgaagataaatattttaaaaattctaccactaaacacctcagatctgtctgccactttgtcttcaggtcattgtttaagccagggtcaggcagactggcccatagactaaatctggcccatttcctgtgtttgcaaataaacttttattgaaatatggccatgttctttgtttacatatatttgtagcgctttttgcaatacactggcagagtttttataaagttgcaacagatcatatggccctcaaaactttctgtttactctctggtcctttattgaaaatatttgctggctactgctctaagccaccctgatcttaccccaggccatttccttcatttgggcaaataatatactaacttggtaatctaagacaaattcttaaaaatcaataagctaatcaaaataatgaatatacatgtttaaaaatcaaatgacattaaaagccttgtaatgggccgggtgtggtgcctcacacctgtcatcccagcactttgggaggccgaggcgggtggatcacttgagggcaggagttcaagccagcctggccaacacagtaaaaccccatctctactaaaaatacaaaaattagccgagtgtggtggctcattcctctagtcctagctactcaggaggctgagccaggagaattatttgaacatgggagccggaggttgcagtgagctgagatcacaccactgcactccagcccaggcaacagagcaagattccatctcaaaaaaaaaaaaaaaaaggccttgtaatgaacaaccaactcttgtcttactctacctccacatctgaggcaatcacttttaatcttttcaggtcttttttcttgtggttaatgctatagctctaaataatcaactggtttactgctttatcaatgctagattttgttgactttctgctatgaataaataaattctgatttaggtcttaaaatacacctccttccttctcccaatatagttgtattactatgtttagttcaattaataaggtgttggttatgactcagtaaatgttcactgcagatctaaacagtatactatgagtttcttttgtctttcatggagtttttaataacaagaaagtaatagtgactctccattcgttctttgtgtttgcctactatagaactatcatataagattattttttaaagtactgtttttttctgggagaagtcctaccctccttctagacattcccttctcctgctctgatatgtgccagtggcttctgggtgtgttgttctcatccttaaacttccctggcctgatgtcctttgttggatctgttgatttatagatcccaagtcttccttttctttgtaatacatcttcattctgttccgcatatctctaagtaactttattagaaggagaatgaaggagctgaattttgaatcttcctgtgtctacaacgtattctgtcttcacacatagttgcttgtgtagctaggttgagaattgtactttgaaaagtattttcctgtagaattggaaacttatactcttctagcatctggagttgggaagttttgtgccattctgatgggtgttcctttgaatttaactcttttattttcttctctggtagcttttaggctttcatgtacctcatgatctgaatttttattctgtaccctcattacttgctgtttcattataatgtgggcacttgattggttctgtctgaggatcctagtcttttgagatctttaagaagttccgcaatcttaatattacatggtgtggcttccttcagttgtttgttagggatttggagattcccaaatattctgctaacttatacccttgagagaggggagaataaacagaggggtgaatgtgaacttcagaattcctagcttcatagtctaaatagaaatcctctaagatcataaaatgtccctaagaactcatgctttacattaatttttttggtattttttctattgattctaagcatggaaatgtagatggagattttgttgatgtattttcaattatgtatcaataatagtgaagcttacttgatttctttaaaatctggtcactatatctataaatatagtggacattaaatgtacagcataaggtaattatgtggactttaaaaaggcattaaaatatgtgccattgtctattactctgctcagtaggctcctaaaagcgtgtatgaacatgcccaacccagtattgggcctccgtaggtgctcaataaatgttagttgattgcccctttctgcttctaggtacataagcaccatattaatttatatagtatatttgattatgttaggttaatgcataaatcacatggattggttgtttcttttacagatcactaaagtggttcttagcaaaggttggaggtgtcttgagtgcactgtttgtgaggcctgtgggaaggcaactgacccaggaagactcctgctgtgtgatgattgtgacataagttatcacacctactgcctagaccctccattgcagacagttcccaaaggaggctggaagtgaagtgcaaatggttctctagggtttgtttgccttgttagtctttcaagttcagagctttctcataccactttagtttttaaaaattagccatacctatttaattgaataatacacatattctatgatacataccactaagcagaaaaattttcacatacacattaaatcatttgccccattatgttcgtatgtagcttcctgaattacagttactgaataactaagaaaataaaatggagacttttcggggggatttggatttcaggtgtgtttggtgcagacactgtggagcaacatctgcaggtctaagatgtgaatggcagaacaattacacacagtgcgctccttgtgcaagcttatcttcctgtccagtctgctattgaaactatagagaagaagatcttattctgcaatgtagacaatgtgataggtattgtgctgttttttcatctttttaaagcttttctctttgaaatgtagcaaaaaaaaaaaaaaaaaggaaaatagcttttccttaatcacaagttttaggtacagaactttttgccttgtagatttttagtcacctagaatcttacagaattgatttcctgttttgaattctcaactccagactaaagttttgttttgttttgttttgttttgtttttaaatttagagacagagtcttgttctgtcgccaggctggagtgcagcagcgctatcttggctcactgcaaactccacctccacctcctgggttcaagcgattctcctgcctcagcctccggagtagctgggactacaggtgcatgccaccatgcccagctaatttttgtatttttagtagagacagggtttcaccatggtggccaggatggtctccatcttttgaccttgtgatctgcccgcctcagcctcccaaagttttatgattataggcgtgagccactgtgtccacccaagactaaagatttttaatttaggcctttttgagggtttaggaatcccttgaaattagatggagaattattgccttcatctatgccgtttcttatgaagggtttctgaatcttttaattgattataaaaatatctaacactttctgttctccttaaaccactttctcttaaagctctagatactagatatctaggtattagatagcaccttctgccctccctacgtaattatgtggaatttcaaaatcaagaatgtttccttgctttcattggtatattgttgtactctttagaagttaagcagtgaacatatattgatagtattattttatcagtagtacagtattcttgggactctggctactaattatctgttccattgcaagacaactttttactttatttcccaattaccattcaacatcgctttccatgagatatgtctacttcaagtgagatgcattgcctggagcccatatatgctagcactgccatttgcagttttctgaatacctttgtgtttgccctaactagcttccttgctgtctttgaaatatttaatatatgatgataaaataattagcttccttatgtaatgtgctttgcttcctctctaatagttgttctcattcctttttatttcctccttagctctatgaaagtttttctgttactagggatagttaggagaaaagggcaaggtaggaggagcatgtgaggcttagggcttttaagtttgaagactcagtgttacaggttttaaaaggtagcagttctcagtatattccatttttaaaaaaaaatgtacaaatatggtctttttagatggatgcatgcagttcgtcagaacttaaatactgaggaagaagtggaaaatgtagcagacattggttttgattgtaacatgtgcagaccctatatgcctgcatctaatggtaacagaataatttaaactgtgagtctgcactcttgtaccactctcttgcaccttactgtccataaccaatgaattagcttagctctactctattttgtctttgtgaaacttactttgacaagtattttatgaaaaatattattgttggttatacatgacttatcacaacttgttataaaacaatttacatgaaacaataaaaagcatatactttagatgtaaactataattttgcttccaaggaacatgatcttgtagttattgacaatatgtcaaaatccaatgtgttgattctttcttagccaggttttcctccatgacttgagtatttccttcatcacttcttgttttgttgttgctttaaaaagtgcttttaactttagtgttcaaacatttattttaataaaatgactatagaaacagaaattttaatcatatataagtatgtaaatacactttaccttttctgaaaagaattacctggatttttttttttttcatttcagtgccttcctcagactgctgtggatcttcacttgtagcacaaattgtcacaaaagtaaaaaagctaggtaaaatttgaaatgctttacttaatttaattaatttactttgcttaatttttacataattggcttaccacttctaaaatctgcttcaatcatatgggtgttctatccaaattccataatgttggtaatcatttccacaatgatatataaaatgtcatccagctttactggggcagtattcctataaatttcagcaagttggcaataaaaataacagctcttagaataaccattaatgccatacttgctttggtttcattgatatattactgtgcttaattatcagttagcagaaaatacggcctagttagcaagcagatttcttttagaattaattcaatctcttaattttttaaaataattaataagcctagtatggtgattaatatgatattcttattaaacagtcattcttttgaatacttgtatttaatagcacctgatacaaaaacatttggatagtacaggaattgttctaaggaacaacagttttgtatgtttaaaattaaatctgcaggatttgtacttatttattacttctccctgttagtaattatgttgatactctgatttttccagatgagcttctggagtattctctctcctcttgtgtaaatagatccctgccttttgatcttttccaggaaaaagctcatagtggattagctgagcattgcatttatttgcagtgcttctaactctttttattgggacatgaaaaaagaaatgccaggaagacttttttgagacggagtctcgccctgtcgcccaggctggagtgcagtggcacgatcttggctcactgcaacctccgcctcccgggttcaagcaattctcctgcctcagcctcccgcatagctgggattacaggtgcccgccaccacgcccggctaattttttgtatttttagaagagacagagtttcactgtgttagccaggatggtctcgatctcctgacctcgtgatctgcctgccacctcggcctcccagagtgctgggattacaggcatgagcccccgcacccagcccaggaagaccattttttaaaaacatgtaacatttctgcctataatccaaggaagtttgacctattgttcctagtttttattgggtatcatgaagttaattattcatgcatttcatagatacataattgttttctagaactacagtcacattcccttgatatgggtattttggaacagtaatcagtcaaatttaaaatgaaagtttaaatttgtattcttgggattttgtaattttagacccacccaagacttatacccaggatgatgtgtgtttgattgaatcagggatgactcagttacagagcctcacagttacagttccaagaagaaaactgtcaaaaccaaaactgaaattgaagattataaatcagaatagcgtggccgtccttcagacccctccagacatccaatcagaacattcaagggatggtgatatggatgatagtcgaggtaatactaatttattttccatgaaattagtgcaagaattacagcatataaagtaacttttgaaatatgtgtatgatttaccaaagggtaaatcacactgacttagataaccccgatgtgacccttgccatctccaaatgagtgatcttcttagaccttgccttttcgggttctcttcctttcacacattttagaacagacctaccttacagaaatctcaaggagcaccatatctttgaagatcacaggtggggaactacagagggcttgactttagtttgctagataatgacacaaaccttctcagatactgtgagcttggataataccatgtttaagttaaggtagttgatgcatacattctagaaatggaaaagctgtcatttaatattacttcaggtataacttcatattcaccagtgtgcatcataaagtattggtttaaaaacattttcttaatcaaagtaaatataaggtttttccagctgaattctttttttttttttttggttgggagacagggtcttgctctgttgcccaggttagagtgcagtggcatgatcttggcttactacaacctctgcctactgggttcatgcgaccctcctacctcagcctcctgagtagctgggaccatggatgcgggccaccacgcctggctaatttttgtatttttttgtagagatggggttttgccattttgccaagactggtcttgaactcctgggctcaagccatctgctctgctcagcctgctgaattcttgagatagcaaaatattttaatagtaacctaaaatccaatatgagttaaagaggattactgtaggtttgctcatttttggggcggttatttattttcaactgattcagaaatgaagcgataattatttctgttccattacattttatttcatagttttttttttttttaaggggcagtgtcttgttacattgcccaggctggtttccaactcctgggctcaagtgatcctcctgcctcagcctctcaagtagcaggtactataggcatgcgccactgcagccggctttgagacaatagaattaattgaatacctactgtatgtcagatgttggaaatcatatcagtgtacaaagcaggtagaattctctgcatagagtttatattttaatgttaggtaacccaactcttaaaaaaaatcagttaattataatgtgtttggcaaggcccatggtaaatataaagtttgataaagaggaattgcctggccaggcacagtggctcatgcctgtaatctcagcactttgggaggccaaggtaggtagatcacttgaggtcaggagttcgagaccagactggccaacatggtgaaacccgttctctgctaaaaatacaaaaattagctgggctcagtggcatgcacctgtaatcccagctacttgggaggccaaggcaggagaattgcttgaacctgggaggtggaggttagagtgagccgagattgcaccactgcactccagcgtgggtgacagagaaagactctgtctccaaaaaaaaaaggaattggaagtacagatgggtgtttagggtccatatgcacagattttaaagaggtgagtgagtgagccacttgattacctgagagaagagcatcccagacagtgaggaagccagtgtaaaggctctgggtgagagtgtgctgagcatgtttgaagagtgttgtggagaccaacagagtgagcagaggggacagtcagaaggtgagaagattagagatgtgaggacaagaaggacggctcagtatatctcacacaaccataaggtggtgtgtcagtagtttgtgcttaatagcaatggaatgagaggccattgaatgttcctgaaaagaagaacaccatgatcttatttatattttaagaggaacactctcctatgatataagtagatgattaggtgcaagagttatgacaggtagatcagtgagaaataatggtccaggtgagaggtaatagtggctttgaaaaggtatgtcttttgtggccgggcttggtggctcatgcctgtaatcccagcactttgggaggccaaggtgggtggatcacctgaggtcaggagatgaagaccatcctggccaacatggtgaaacctcgtctttactaaaaatacaaaaattagctgggcgtggtggcaggcacctgtaatcccagctatttgggaggcagaggcagaggattgcttgaacccaggaggcagaggttgcagtgagccaagatcgagccactgcactccagcctggtgacagagtgagactccatctcaaaaaataaataaatacatgaaaaaatatgtcttttgtatgttcttgataatttttgttttgtagtgtgttttgggtctatgttgctgggagaaacactttctgatgcttttatgtaactgattttcagatacagttgaacaggtaatttgatttgggggcttggagtttgcaaagaagtagtccatatacttggaggaattgatcagatcagcattaacaagaatttccacttctgaggatgttaaaaaatgtctgaaaaaggtttccatagtctcttaaatttgggaagtgcttcatttcacaaaatatgaaaggtttcttgataatagtacacattgtttcccaaattatgtgattataataccttttaaaaacaacacagaagaccttggaaggttttccttgtgacttaccacttgtaaacactgagaaatggtgatatgtttcaatttcatattttctcattgactcgtatcagggtaaaagaaaatcagttgaaaaattacccttgcttttttaaaatttacgtgataaaatagcccatctgaatttactgaatttgtccttatttttattgaatatgaaaaaagattgtttagtgtgttggatgttaaatgctaagacaattttagaatttaaggaattgaatatactgtatcctcatgttcatttgcatgccaggatctcacatcctttgcagaaggaaaggtacattcctagggataaaataaatgcatgtttcttggacaacatttttgctttctgtttgctaaataaaaatcctttttaaaaatttagtattgccacactttgccatattaaaaatgttttagattactatattatcctgaaactacatggacacacacacccctaaaataagttttatggtttttcatatgcctgtacgggagaaaaaataggaaaagaatacaatcatcataagttcttattattacattatgctgagatttctaataatgctgccattttctgggtattttgtattaaacctaaaatttgtgatgttttagactgtttcactaacatgttttgataacgtctcagtacccttgggaaagcattataaagtagtgggcaacgatgaaacctactctggatgtttttaggcaaattttttaacttctctgatgttagtgttctcatttataaaataggtgaaccaggatgagcccataggatagttgtgctgatgaggtgcaaggatgcatgccaggcacccagcactggctcttcccagacatggagtgctcagtaaccgtgagctattagaatacaagtgcccaaccagtgcttgagcaattgtgttctgtgtccaacagaactcaacaaaatcccacgtttgtctttatatgtgaattcagttccttttgagacagtaagaaattatgcctgtgttggggtaactgaactttcaggaggagggaattgtctgccacaattattctctgaacttaatgtttccatgtctttttcttcattttggaagttgtggaaaaattataatgaaagagtatataaacgttttcctctgtattatagcatctctgacagtttcctttattaaaaagtatgttacattagggagagacttgatgaatttaaaattaaagtttgaaaagtgttattgactataagtgatcttcagctgtgcagttttcaacttgaggttgtcagaatgtaatattacacattatattacacacatctatagaatccaaattgtgatgttcctggagtattggaacaaaacctatgactttttgtttctattgatttttaactcttctaataaccacttctttaagaaaagtcatacattatcactttggtgtatcagaaacaaattccttacgcaataaaagcatacttctttctcattcacctactgggatctagaaaccctgttaatgcaagaaaaaaatcccaaacctcaataaaataacactctgtttgtctgaagtgtggaaacacaacacatttcctctcaactggtggtcccagatcgaccatcacagtgtatggatgtgtttggaggtgtaggaataggactgcactgaggctctagaaggccagcaggtggggcagactgaatggagggaggggactggcattcagtaactactggagcgtgggaagagtgaggtagactgtccatctggtgaaggtggctgcttccttgaggtttgttactttctgtaatgttaattccctcaacttttaaaatttgatttttagacaagttatacattcaaatgatttaaaattggaaaataataaaaaggtaaacagtgaagtctctccctttcccctgccttcatgcccccagtttacatctccagaaacctcagaggtttctcgtgtaaccttccagatgtattttatgcatgtacaaggaaatgtgtgtgtatatatatatatattttgtgtgtgtgtgtgtatatatattttgttccttttgtcttactactttttactgtccttcatttttttatggctgcaaatattcctttgtatggaaatataagcaatttaatttacctgttctttcccctgttgatagacctttgggtttctttaaattttttttttttttttttttttttttttttttttttgagacagagtctcgctctgtcgcccagtctggagtgcagtggcacgatcttcgctcactgcaagctccgcctcccgggttcacgccattctcctgcctcagcctcccgagtagctgggactacaggcgcccgccaccacgcccggctaatttttttgtatttttagtgagacggggtttcaccatgttagtcaggatggtctctatctcctgacctcgtgatctgcccgcctcggcctcccaaagtgctgggattacaggcgtgagccaccgcgcccgactttctttcaatcttttactgtgaatagtacaatgaatcacctggtatatttataatgttgtatgtaagtgggcctgcaaaggtgaattccttgctaaatccaaagacataatgcatttgaaactgtttttggcaggtaggatacagtttttttttttttcatttatttttattatacatatctgaggtatacaacatgctttgtatacatagtgaaatgattactatggtcaaacaaatgtctgtatccttcaccttccatagttactctctgtgtgtgtacacctaaaatctctttcagcaaattttcagtacacaatattattaactatggttctcatgctgtgtattaatttgatctctagaattattcatcttacctaactgcagatttgtaccctctgacccacttctgcccatcctacccatcccctacctccagacccttgataaccaccattctactctctatacattcagtttctcactcccctgcttcccattctgcttcttaagtgagatcatacagtatttttctgtgtctggcttactttatttagcatactttcctcccagttcatccatgttgtcacaaatggcagtatctcctttcttaaagctaactattccattgtataaagtcctcattgtcatcagtaagttcttagaaactgtggttaagaggggaaaaaaaagtatgaaaaactgatttttttttcattttgcattatgccaaaattagattgaaggaaacagtgttacttgaggacctgctgtatgttcatttagcttaacgtctcagttcccaagaacctattgatgacattaagggaggacttaatatatgtatatacaaacgtcacaatttctttatccattcatctgtccttgaatgggtaagtaaattgtccattaggacacttagtttgtttccatatcttggctattgggagtaatgccgccatgaacgtgggagtgcagatgtctctctcagatgctgattttattacctttgaatatatgcccaacagaggcattgttggatcttatggtagttgtattttttttaaggaaactctatactgttttcaataatggctatactaatttacattcctatcaaccatgtacaaaggtttcattttctacacatcctcaccaacacttatgtctttgcctttttgttaatagtcattctaagagacacgagatgatatctattgtggttttaattttcattttcctcatgattatgatgttgagcatcttttcatataccatttgaccatttgtgtgactttggaaaaatggctattcaggtccttgcctattttaaaatccagttatttggggtttttttttttgctactgagttgtgtgagttccttatatgttttggattttaatgccttatcagatgtgtggtttgccaatattttcccctaatccctgtgctacctttttaccccgtttggtttttttttattgctatgcagaagcttatttgcttgatgtagtcccacttgcttaattttgcttttgctacctgagcttttggtgtgatatccaaaaaatcattgtcaaggaggatattaaggagtttttctcctatatttccttctaggagttttatggtttcaggtgttaggtatttaatctattttgagttgctttttatgtatgatgtgtaagacaggcatcaggtccagtttcattcttttgcatatagatatctagttttcttaccactacttattgaagacaccatcttttccctattgtatcttattggacttgtcaaaaattagctcataatatatgtttgggtttgatagtttgataactatcactttgtaatataagttgaaatcaggtagtgtgataccttctactttgtttttctttctcaagattcttttggctattcagggtcttttatgatttaatacaaattttagaattgtgttttctatttttgtgaaaaatgcctttggaaatttgatagggattgcattgaatctgtagatcactttggatagtatggacattttaacaatattcttccaatccacaaacttggggatatcgttatatttatttgtgtctttagtttttttctgtttttttgagacagagtcacgctgtgttgcccaggcagaagtgcagtggtgtgatctcagctcactgcaacctccgccgcctcctgggttcaagcaattctgctgcctcagccccccaagtagctgggattacaggtgcctgccatcatgcccgcctggccaatttttgtatttttagtagagacagggtttcgccatgttggccaggctggtcttgaactcctgacttcaggtgatctacccgccttggcctcccaaaatgctgggattacaggtgtgagccaccatgcccggctgtgtgtcttcagtttactttgtcagtattttatagtgtttagtatataaagttttcacttccttcattaaatttgttcctcagtgttttattctttttgatgttattttaagtggaaatgttttcttgattttttttcagatcattatttgtataaagaaatgcatctgatttttgtatattgattttgtatcctgctacttgactgaattcatttattctagtaactgtggaatttttaggggtttctacatacaggatcatgtcatctgcacacagggataattttaccccattttttctgctgatgccttttatttccttttcttatgtgattgctctggctaggactatggtgaatataagtgttaagagtaggcatccttgccttgtagcagatattgaagaaaagctttcagtctttccctgttgtaggtttgtttttgaataggcaatacctgtgcatgatacaagaaatacaaaggtcttaaaaagagtgaacaatgttaagttagcctaccttttggccatcccttccttggaaagaaccagtgttttcttataactttccagagattagtcatctagatacaagtatgtatatatgggagaatttctcatatttgggtgataacggtctttttctctttttcttttcttttcttttctttctgtctttctttctgtcctcgtctcgtctcttctcttctcttttcttcgtttcttttgatggagtcttgctttgtcgcccaggctggagtgtagtggcgcaatctcggctcactgcaagctctgcctcccaagttcacgccattctcttgcctcagcctctggagtagctgggactacaggcacccgccaccacgcccggctaattttttgtatttttagtagagacaggttttcaccgtgttagccaggatggtctctatctcctgacctcgtgatccacccgcctcagcctcccaaagtgctggagaggcatgagccaccgtgcctggccgataacagtctttttctttatttcagcctgtgggaatcagaaggcccttgtgaagatgttggttagaagagactttagcctacagtgataccacttgtgttagggcactgtatgtgctactttatgccatttgtctcaacatgtatgcttactggtgtcactgtgaacctcatcaataaaagtgctctcttggtttttactgtccttgtggtgcattgtttcaggtgaaaggtggcctttgtgctagatccagtgctatccttggccacaaaccattacatatgattaacttggggatttcctcttcatcatcctggagatcatcttctgttctctcctgtgttacatgtgttttctgcaatttcatgaatttctctttatttcttccctcaatttgggtggaacgtatcttccatagctccctgacagagaatgtgtggaaggtaagttttgagcattatatacttctgaaaatgtctttattttaccttcctacctgactcatcttttccaggttggaaacacattttcatttatcatttttagtcaattgatccactgtcttttagtttctagtatatgaagaactcggttttttctatgtgacctgtgttttcttggaagctcttaagattttaggaaattctttgtcctcagtgttctaaaatttcatgaggataacgtctgtttttgtctatttttgatatttaaaatctgtttcgttaggcactgagtggtctctttcagtctgctgtcttatatccttcagtggtaggaaatgttcttgaactatattattgataacaattccctctctttttccagaattctgcttttcagatgtgaaacatactcagtttttctctgcttcttttcaattcatgtccttattttatctcccgctactgagttttgtttttatttcagttatttcaagagctttctttcctccctttgaatgtttcttttgtagcatcctattcttgcctcaagggtatcttatattatccctcagaggattttaatccttttgaagatttttttttcttcctacttagtctgttaattccaaattgtcttttatgttctcaggtctctgtcttttatgttacagatcaagggtgttgcagatcttctggcttccatggcccacattggaagaagcattgtcttgggccacacgtaaaatacacgaatgatagctggtgagcttttttttaaaaaaaaaaaacctcataaaaagtctcataatgttttatgaaagtttatgaatttgtgttgggctgcatttaaagcatcttggctgcaggttggacaagcttgttatagaccattgtcagataatctttatggtacatgcatgattaaaagtgaagaactaaagatggagactggatagatagtatttttatttttaaaaaaggaattaagtagttgattagaaagctttgagtatgtggcggtgcttgtcgatttgtaagtttagtggggtgatttgtgctgaccatttggtgaaccctctggtttcagtatctttagatgttcttcttgaactgatcaggttccccacaacagtcttttcaaacctcatacttggaggctagagatctggctgctagctttctgagaattcagtggggaaatgtggggtccggcagcgggagcagaatggggttgtccacaattagtatgcccgtattttcttggtcctattttcgatcttcatcccattgttccatttaaggtcacccaggaatcctcatcccacaaatgagagtagcagcttctcagtgtgtaaacctaggaagcaggtgtaggaagtataacttctgcagataattaaatctcttgttgcttcagttttctcccacttatttccaaaggtggccagttttcctagtttctcagccttctgaggattgttataaactggattctttttttcagttctttctgctctcaactgagaatttgccttcgttaacttgtttttctcctttcctattgtctttttttttttttttttttttttttttttttttttttttaaggagattgggtctttctctgttgtccaggctggaatgcagtagtgtgatcataactcactgtagcctcaaccttctgggctcaagcaattctcttctcccacctcagcctcccaactagctgggattacaggcatgccaccatgccacagcttgattttatcttttaaaaatagattatttcagtgtgtttttagtagggtttcaggagaatgtaattttaatgtatgaatttagtctgccaccttaacccaaaattccctgtcattaacttttaggtgggtttatttgaaggtaaacaattggtattgtcatctttggtgcttgtttttttcagtaattttcttttttcttttcttttctttctttctttttttttttttttgagacggagtctcgctgtcgcccaggctggagtgcaatggtgccaacttggctcactgcaagctctgcctcccgggttcacgccatgctcctgcctcagcctcccacgtggctgggactacaggcaccagccacctcacctggctaattttttgtatttttagtagagacagggtttcaccgtgttagccaggatggtctcgatctcctgacctcgtgatccacccaccttggcctcccaaagtgctaggattacaggcatgagccaccgcgcccggcctttttttttttttttttttgagagatggaatttcactcttgttgctcaggctggagtgcaatggcacgatctcggctcactgaaacctccgcctcccaggttcaagcagttctcctgcctcagcctcctgaatagctgggattttaggcatgtaccaccacgcccagataattttgtatttttagtagagactcaccatgttggtcaagctggtacggaacttctgacctcaagtgatccacctgctttgacctcccaaagtgctgggattatgggcatgagccaccgtgcctggtctataaacttttcttttcatggtttagtcataagtccatagccattatcagattgttatggaattggccttaaatatagaccaaatataataaaaaagaaaagacaaataccctgttcatgtcattacagaaatacgttatctctaatactgagaatattgaaggagttaacaacttgattttaaaatgtatttgataaacatatctttttcctgtaatacaatgtaaagcatatataacttggaaaagtttgattaccatagtgttaaaatagcattctctaaaatagcattctctaagcattccatttacctcattcagtgaagtatttattgaacatgtattaggtatcctactaacaatacacctgttactaagaaaatctgtgtacctgttctcatggagaatatagtctagcagggacacagattttaaagaaccaataaaaatgaagcatgacgttcatacatacgagcatacaactgtttgacataatcttatctaaatatcaggaattctttaatacagtgaagtttagaataaatcctgaaagataagttaggtagaaggcagaaattggggaagatagtggaagaaagagcttgatacattcaaagaactgagcatagttccctggtgggagtgagatgaagctggaaagtttacaagagactgttgtaatgggccttgtaatttgaagtttattttgagggcattgggaagacatgaaaggattttaagcagaaaattgatacatatttatagaaagatcatttatgcagtaatttaaagaattgattggagagaggtaagctttgaggtgggcaactagataggagcatattgtattaatagtgagtcatctgaggttggactaagatggtagtagagagtgataaaatgcatttcagaggtattgaggagtcttggttgtaggaggaaagagattaggaatgattaaggtggtcttccaggcctctgtcttctccaggttacatttccatgccttttaatgatgataggtaacatgggaaaaaggagaaagtttattttaaattagtagttcattttggatacacagttttcagtaactaggtaatattcaattatagctgtggttgaagctcagaagagagttctagtctagagacctggacctgaagacataattaaaagcaagtgaatttgttaagtgcaaatgggttgcacttaacagaactctgagttctgtgttccccttctctgattatgttttatttcatgggaacactgcactaagcagcacaatttctagaaccatttggggctgcttctatctcctttcatactttccctaccaacagggatgtacaattaaaatggctcagcaacaaccctactttttattccccatgatgtagggattatatatttgataggtttttccagttttgtgtatacatttacttttttccagaaggagaacttatggattgtgatggaaaatcagaatctagtcctgagcgggaagctgtgaatgatgaaactaagggagtggaaggaacagatggtgtcaaaaagagaaaaaggaaaccatacagaccaggtatagtgcctgaggtagacatttcaatatcatcaacacttggttaattaaagaaaaatacaatactgaagacttcaattaaaattaaatattcaggattaagaactgtctaaacaaaaaaatgtgcacataaattaaagaactaaactatttgaatacgactttttagctctagagttctttattttgaatatgtgaatacttcacaatgaatcattattgaatgccttatcccaaatgttaaccattttattaaatgctttactagattggcttttgttcatacttggactttgaaggccatttatatagttcctctggatgtgtacttctgtaacgcttttaattttcagtattcactttctaatatctttttttgaaaaaacttatttcagtgtttatgcaggagtgccagtaagtatacagtgtgaaggggaacaagacagagttattatggctcctagaatttatagtccagttaaaaaccatgattgattaaacactcatttcttatctgcctcaggagtggagagaaaagcggtcttgcctgtcagttttatttgccttattggaaaaaattattaaaattgtcacaatacagaagttgtaggcttttatgtatttatttaaaattttttttcccgcttttcacacgtgttgagtaggctttccttagccagtttattaatgtctgtttaccaatgaggttttaaattggattcgtacaatctttatgcttcttattgcttatattttattggtaagagtgatctaaatcccttttgatatgtaaggaagaactttcttacttcattcgtattccatgagaccttaaaagataacctgtcttttaaataggtcatatctataataaggacctacggtgagttgcttctaaatcattttatgaaaatgatttcatttcttcctaatcatgaggcttataagtgtacttttttagacattgcagatttcttccaggaacttgtatttactgttttcttttcctctgcctcacatggaagtcaaccctctaattgagggacccattaggtcacagagtatattgctagacagcgatatcatttcacaaaagcttatagtgttgactgtgtaccagacctctattctaagcacttcacttatgttatttgtccttttaacatatgtatgagaagctgctttgccttacccccatatttaaccagtgaaagaattgaggcattgagaagtatttagtgagtaagcagaattacatagtctgactccagattccacgctcttaaccacagggctctatgtgtcccatgtataaatgccctcatacgttggagtaccagacactgtccccctgaaatcatatcagtcaaagaatatttgtgtcatctaggtagtttgtgtcttctgtcctccagctaatgtaccagttagccggttaatatacagacacagtcatccatcacttaagttcagagaaatacatcattaggcattttcatccttgtgtgaacatcatagagtgcacttccacaaacctagatggtatagcttactacacacttaggctgtatggtacgctaaattcatttaaaaaaataaagtaattgtgctacggtgttataactacggtgatgtctgtatgtggtgggaatttttcagctccatcataatcttatgggaccactgccttgacatgcagccctttgttgaccaacatcattatgcagtgcatgactgttatgtgatgtatgaggcactaatatttgtcaaatagataagccagcgtaatttagtgtttgatatttacactgatactgttgagaagaggaagtgcacacaggtctttttgtattctgtttgataagtggtaacagtggctttgcctttttttttttttggttgtttttaacttctattttacctaaaactcaggttatttatttagactagcacagacttaattttggaaaatgacttactattcaagataaagcatttttatcctgtgtactgtggaaacgtagggagaaattatttatcagtttacccaatttcttttttggataggtattggtggatttatggtgcggcaaagaagtcgaactgggcaagggaaaaccaaaagatctgtgatcagaaaagattcctcaggctctgtttctgagcagttaccttgcagaggtgatggtatagtactgacttaaaatttttttttttttatgtaaccccttggtcttgatatttctattggaaagaactatcctaaataatgttacagtcaataagagccttattgcctcttattgttactcaataagagtcttattgccttttattgatgaaaggatttgagtgcatatagagttcatatctgtaatacagcaatcaggttttataaggaaatggtttaaatccaatagactttattcttttgagattttttgacaagctcttttttcctgtatcaaattattaaatatattttctatatttaaatataaatggtttagggactgaataacttagttacataaagtactttatggtcatctccaaagcctttctttgactgccttagctacttatcatataatttgaaattctcaagtgacagtgcacctcaatttttatgtatgtatgtatgtatgtatgtatgtatgtatgtatgtatgtatctatctgtctatctgtctatctatctatctatctgcctatcttagggtctcactatgtcatccaggttggcgtgcagtggcacaatcatgggtcactgcagccttgcactcctgagctcaggcaattctcctgtcctcagcctctgatgtagctggagaccacaggcacacaaccaccatgcctagctaattttttggctttttgcaaagacagggtctcactttgttgcccaggctggcctagaactcctgtgctcaagcgatcctcctgcctcagcctcccaaagtgctgggattacaagcatgagccagccactgcgctcagccctcttcttactattattattattattgttatggttgtagaagtaacctgaaatagagatacatttaaatatctgagtgagtgatttcagcaaaggagagagaccctgtgttactattttaggagtgctcttgattgtgtgaacccgttgaatacaccacttactaaccgagcccggccattttgctcagattattcagagctctcaggcccattcagaatgaaattcaaaatctttaccatggccagaaagatccgtgcaatcaagatgcaccatccccatcctaatttccgggcttgtcgccacgccagccacaatgccatgctggcctccttgctgttctttgagacactgggtgcactttgcttcaaggacttcgcttgcctgtccctgaacctggaatgctcttcccctagaactccttgtggctgccactgtcacccccttcagatctttatttagatgtgtctatgatgaagcctttcagggccgatctatttaacatttccctcaccacccctccactctgtagcccctttgccccttgtatttttctccatagtacttattataatatctaacacactataatatcaaatgttaactccatgaggataggcattttgatctatttggttccctgcggcatctccagcacctagaacaatgcctggtgtacatagtgggtgcttattaggtacatgtcacatgaaagaggaaaaaaacgagtgtattaaagaatccaggagccgggcgaggtgtgtcatgccagtaatcctagcactttgggaggctgaggtgggtgcatcgcctgagttcgagcccagcctggccaacatagtgaaaccccgtctctactaaaaatacaaaaattcagctgggtgtggtggcaggtgcctgtaatcctagctactagggaggctgaggcaggagaatcgcttgaactggggaggcagacgtcgcagtgagccaagattgcgccattgcactccagcctgggcaacaagagtgaaacactgtctcaaaaaaaaaaaaaaaaaaaaaagaatccagggaggccaggagcagtggctcacacctgtaatcaatctcagcactttgggaggcgggcagatcacttgaggtcaggagttggagaccaaaatggtgaaaccctgtctctactaaaaattcaaaaatcagccaggtgtggtggtgcacgcctgtaatcccagctactcaggaggctcaggcaggagaatcacttgaaccccagaggttgcagtgagctgagatcacgccactgcactccagcctgggcgacagagtgagacattgtctcaaacaaacaaacaaacaaacaaacaaaaacccaaggagcacagaacagctacatattggaacagctaaatattggagtacctactgtgtgttgaccattccacagcatggaggaaactggtcttcccttggaagagcctccccactattcaggtggtaagagaaataacatacccagggctaggcataatgcagacagtgttataaaggaggcattgaacaaaggagagagtaactgaaggaggtggcattttgagtgaccttggggccgattagggtggttacaggttgatgtttatatatatggcatatatgttgggggattgggtggcggggaggggtgcaggcagtcagaatagagcaaagagaggagtaagtatagaatggtgtatcaaatgtttatccaaaagcaggatatggaactagtaaacattttattcacagtgtgtattttttttgagagggagtctcgctctgttgcccagtggcatgatctcggctcactgcaacctctgcctgctgggttcaagtgattctcctgcctcagcctcccaagtagctgggattacaggcgcacgccactacgcctggctaatttttgtatttttagtagagacggggttttgccatgttggccaggctggtctcgaacgcctgacctcaggtgatcagcccacctctgcctcccaaagtgctgggattacaggcatgagccactgcacccggcctgttgtctatattctattttttttttttctgagatggagtcttgctctgtcacccaggctagagtgcagtggcgcgatcttggctcactgcaacctctgcctccagggttcaagcgattctcctgcctcagtctcctcagtagctgggattacaggctcctgccacagtgcccagctgatttttttgtttttttagaggagacggggtttcaccatgttggccaggctggtcttgaactcctgaccttgtgatccacccgcctcggcttcccaaagtgctgggattacaggtgtgagccaccgcgcccaacctgttgtctatattctaaaatttggataatttggatatggtatagtttatgtggccattttcttttggtgaacatgtaggttgtttctagcttttcgctattggaaacagtgctgcatccttgtgtatgctttctgcatgagtgatatttctctaggatacatactgtaattatatgcttgtctatttttttgtgttttaatttatttaatgtctgtgcttcctgtgaaaatacaagctccatgaggggaggaatccaatttgttttgtgccgcactctttaattattatctagccaagtgcttgggagaaaggagaggtcaataaatatatactgagtgaatcaggctgaaagattggctgggaccatggtgtggttttgtatcctaagagagggagcctgacttattttggaaaagtaaaattttttttggagaatttcacacaaagcagtagcaggatggttattggtggaatttaggaaaacgtattctggactagaaagaaggcaggtacaggaggtgcgattatgagattattacacaggctagaaggaaacaaagaaacatgggtggtgagaatagaagggaaagggtacatacatttcagagagatcagaaggataggatttgtgagatttactaagtagctataaggggtgaagtaaagaaagcatagaaggaaagttgatttctagcgtagaacattttaattttacaaacatttattccctctcccagctccatggaaaaagtactcactaattgctgttggtatattaatttgtattacattttcttccccactttctcttttttttttgagacagggtctgtggcccaggctggagtgcggtgatgccatcttggctcactgcagccttgacctccccgggatcaagagatccttccacctcagcctcctgagtagctgggaccatgtgtgccagccaccatgcccagctaattattatttttttttttgagacggagtctcactctgtcccccaggctggagtgcagtggcgcaatctcagctcactgcagcctccgctccctgattcatgccattctcctgcctcaacctcccaagtagctaggactacaggcacctgccaccacgcccggctaattttttttgtatttttagtagagagaaggtttcactgtgttagccaggatggtctggaactcctgacctcgtgatccgcccgcctcggcctccaaaatgctgggattacaggcgtgagccaccgtgcccagccctatgcccagctaatttttatatttttcgtagagacagggtttcgctgtattgcccaggctggtcttgaactctcgggtttaggtgagcgccttggcccccgaaagtgctgggattataggcatgagccactgtgcctggtttccctttcaaaagagattttgggtgtttcgtgtcactgtatccacgccgcgtgcggtctcttgtgcgtggcttcttttcctgagcacgcacagctgccttctaacccgcgagcaatggcgttaaggtttttgtttgtaattcgggggtgacccaggggttcgggccgcgggcccctcccctcgcccaggcacaccttgcagaggagggggcggcggggacaggacccgggtctgtgcctgcgcacaccctcgcgggccaaccccctccccccccgccccgccgggtacctgtcacggctactgccgcggcgcgcgcccgccacgttaagccggatggcgggaggaggggtgcggggagggtggcacggcgcgcgcgtgcgcgggagtcgccgagcaagaactggtagtgcgcgcgctcgccgctcgctcgcgtcccggaggcggagtctgcggcggcgggcggaacgggggcgcgcctatgctagtcacgtgggcgctggggcggggccgggcggccgttcaaggcagggggcggggcgtctccgagcggcggggccaagggagggcacaacagctgctacctgaacagtttctgacccaacagttacccagcgccggactcgctgcgccccggcggctctagggacccccggcgcctacacttagctccgcgcccgaggtgagcccaggccctaagtcctccgggcgggggtaggggtgggggacgctcctttttgttgggggggggtcttggaggcgcgaaggcactaggcgcctcggcggatggctgaacccctcgcccgcggctccccgtgtcttttggggggccgggtgcgggcgcggaatccgggaggtgtccgcacaaaaggccgagaaaaactccgcgacgcctccctccctccctccgccctccccgtcccctcctctccgcgcccgctcctcctcattcaaacccggccggcctgagtggtgttagctcagtcccggccgccgccgcgtgaggaaatggcctaggagccggagccgcaggtaaagggggcgcgccccccgcccgcgccagccggggcgcccgcccggtcctgcggaggctcccgcgccgcccccgaggcgcccggctctcgttgtcttgtccccccccaggatgacctgagttccccgtgtctgctttctagccgctcctctagggcgccccctccccagctggctcctgcgcttccgcccacgggaaggtgcgggcgatcccgggctgcatccgctcttggccgtcacactcacgctgcacgatttagaagggcttggggtgcggggttccctgagtctccgccgggagcgggggtccgggggtctgcgggggtgggcggtggggtgctgttccgaaaagttgggtcgccccgcggggcgggtctcccaatttgcccagtcggcccttggggcgcgggcggaggggggacgtcggcgtagggtccccagcgatgccccgggaagggctgggacaagttggaaacggtcaaaacaatgcgtctggacgggcagcattgtttcttattgtagttttaatctgcatttctctaatagatagtgatgatgaccagtttttcatttgcttatttgccagttgcaaatctctattagtgaagtatctgttcacgtattttgcccgttttttaaaagttgggttgttttcttacaattgaagtttattttttcttatactcaaaattttaattcgcacataataaattgtacatatttatgaggtacaatgtgatgtttcagtacattttacattgcataatgatcaaatcatggtaattagcatattcattgccttaaacatttaccatgtctttgatgtaagaatattcaaaatcctcttttctagcgagaatatgagtgtattttaaatgttcatctatttgttttctcacaatcctataaaatgatagcttgagtcaatgagttatgcccccaagtcctatcaaccttgtctattttagtgaaatttaatattgtttagaaaacactaagcaaacatagttattcagagagcataactgagccctctggttattctctgtaacccacaaaggaagctgaacacttgatgtaaacttcttcatcagagtaaataataatcctctccattacatacaaaagaaaaaataactagagagatagtctctgctctgaggttattatcctgtggtctttggttttggtacattctcccccaccccatgcccttctccctcatctttaatgagtatctgtatgtatggcagaacagtattttttttattatactttaagttttagggtacatgtgcacaatgtgcaggttagttacatatgtaaacgtgtgacatgctggtgcgctgcacccacaaactcctcatctagcatttggtatatctcccaatgctatccctcccccctccccccaccccacaacagtccccagagtgtgatgttccccttcctgggtccacgtgttctcattgttcagttcccacctatgagtgagaatatgcagtgtttggttttttgttcttgcgatagtttactgagaatgatttccaatttcatccatgtccctacaaaggacatgaactcatcattttttatggctgcatagtattccatggtgtatatgtgccacattttcttaatccagtctatcattgttggacatttgggttggttccaagtctttgctattgtgaatagtgctgcagtaaacatacgtgtgcatgtgtctgtatagcagcatgatttatagtcctttgggtatatacccagtaatgggatggctgggtcaaatggtatttctagttctagatccctgaggaatcgccacactgacttccaccatggttgaactagtttacagtcccaccaacagtgtaaaagtgttcctatttctccacatcctctccagcacctgttgtttcctgactttttaatgattgccattttcaaagaatagtatgtttttaagtctgtgcagtcttgggccaagctcgttctattccccattctacaagaatcacaagagcgctaggattctgtttggggttgccgtggacacagagttcttactacagaactgacttattctcaataggaggtaaagacctagaggtgaggtctctgagcaagggagtcccatcccatcctctgccctctctgttggctgttatcctctcatcttcatcaggagaattaaaatcatgtaaagttttggcgggggaactagatggtggtctctgcggcccatagacaggaaagtttgcttatacccagctggggggaccactaattgacattcctttcccctcccagggaccttacagagtccccttaccctcacggtactgggggacaacccgtgggtgtaaggccaaatagcaataaccttgttacttgccaggaattgggtcaagatttgatttaacaagcttggttttgggaactaaaaaaatgaaaaaaggaaaagccataatcttgaaaggcaacaagagagaaaactgctaacaggatcttgattaaatttctccctcttagagaatgttggaccgacgacacaagacctcagacttgtgttattctagcagctgaacacaccccaggctcttctgcccggcagtggctctggaagcagtctggtgtataggtaagcatgtccagggcttatagggagaaactcccagaaatccagctctgccttgggttgccctggttcacgtccaaagatgtgcttgggccacatctctggagcacaaggtggtagactgagagctttgatatttctactcctactgcagatgagctggtataactctgaaggtatggaatttgctgttgtctgtgacccagcaaataaaaatagaaaaataattcgatagaaaaataatagaaatagaaaaaatttaaaaaacaaaccaagcctcattctatgacattttaggcagtgtgataatatgcatatactggtcactttaatctttcctacaggggcagctggttgccctaatgttggatgctctgttcaaggatggtaagctagtgttcagctcaggaagccactccacagagatggccaccaaaagggcttcagtggtcccatctcaattaacacctgaaacattgttaattattacagtgaaggtcacaaatgggtttttattagtgaaattggcggcttacaaagcagcatgatggatgttacaattatatgacattttaagatctgtgaatcaactaacgtgttttggagacagcccacccttgcataaacaggataaaggtgtatgagggtggcctgtagtgtatatttagagacgacacccaaggcttgatcctcatatggtcctatctccaggaacgtttaggaagattttggcctctgaaacattaggaatctgttgagaatgaagctttcatgcttggagtacctaaagtgcggaaagcttacagaagcttatatactgtgtctgcttgctactgaatgttttgttaaatgaatatctgtatgtgtggcagatttggtcggagacctacttttcattataacctggtagcatgattataaaggtgtagctaaccttcagctaactcaaacttctgtggttgctcctatctaccaaaaagcatttaagaattctgcatgaccacttcagtttaggacggtttgcaattctcaccttccttagggggcaatttagctagttacttattcatgtcccatgagggaagtcattctgtgccccaaagcagcttatcaaagtattatttcagacttcatgcagtactctccctggagttcaggtaacatctatggatgtctcgtgccctttttggagattagtttcccaaggaacttgcttagcaatcctggcttgtcacctgaatctggagtaatttgagtgtcttccagttctcttcctcagtagaggatgtctgaaaaatctagtaatcatttaataaggctgcttatgtcagaaactcaaattcttacctttttggtgttttgaacattttcccctgttatgatttattagtgtattctgcatagacaatccaattattcatcctgctgaaaagtagcggatgcctatagatgcctttctttttgtaaaaggttattgtttttcctgagacctggatgaatttccaggagccattcaaggacatgagaacacccacttagaacttgaaaggttcccctcatggccctcagaccaggctaacgagatgcgataatttgaactctggcactcctttcctcacaggctgaaagactagcacaatattaatgtctatctgtgcttaaaggttggagctattgatcagagtccaaaattagtttgtgtaggggaacttttcttaaagacataaaaagataccatttaatatattgtttccaaaatgtgtttctcacacatttccactgtgagaaagaggttctgtggtcaaataggttaagaaacctcagcacactcttagagaatcccagttgttatcagcagcaaaaaaatgtatgtgatcagtttcttaaacttatttaaacgtttgaaaagttagaaaattgtggtgaagagcattaattcttgagtcttgggagtgtattaccttgatgagaatgtttgtgtatttgaaactaaaaatgtgtatccgtttatattgccacatactgatttttatggcataatatatggtgtagagagcaggttgtctaaaaaccaatattggcaaaatgctgaatattcagcatggttttatgaagttgacagatgtggagtgtattttgcatgtgtcttaacttacagatgaggaaatgaagtagcagagagattaaattagccaagccaggggtttcggtgctaggaagtcttgatattgtaaaacatagccatataactttaaaaaaatgaatccagacaaagagaaaacaaaatcattgtaaacacataatccactttaagttcacaaaatgttttaaacataattaaggcttgacttatctacttgtttatttcctaccaaggatgaccgggaactagccattgatatagaaacattcattattcttacattttctttcttttttctgtgtcccctctctctctctctctctctctctcacacacacacacagacacacacacacacacagtctcagaagtactagtgctgtatcctgaaattgtttctttagttcttgtcaaaattcctccgattttattttttgtgtcctgaaatactgttgagattaacatcctcattgccttccaaaatatctgactttattttttgtatgtgctttttactctttggtagagttatggattcactaccagattctactgtatgctcttgacaactatgaccacaatgggtgagttgactgatctaagtggtgaaaaatactgggagcatcaatggcaataacagctttctatcagagactttaagcatctttggtaacattgtttttgaaccagagtggaaaaaataagatcaggtcagaagaaggatgcttggtactcaaagattgtttgtgactctaagtaattagcagccaaaaccttaggaaactatcagaatgcctgtgtatgagactctcttcaagagtggtccaagagaggagagaatcctacttggagaaagaaggtggtagcattggacaggcagcagaggagccctcagcagcaagaaaggagctaagagaccctgtatctgtccctcacccttcagagctggtgccccaaactcaaagccatcatcacattggatggagcccctgcctcaggtttagtcacttgatcctatttgaggagaagcaaagatatctgtgactcatgaagagcatgaaggtggtggagggacttgataattaggaaatcaaaatgggcaagaataatgtgtgcctacaaatgggacatgaatttgaaggaaatttaagttaaatttgctgccacacatgatgatcaggttcagtaataattgtatttaaatcttgattcattaaacttttttgagagtcctaaacaatttttattaccaacacatagagacttctttctagagaaaaatcaagtaccaggtgccaaataacagatttacatgagaatttttagggacaacacattgtaatttgtagcgcaatcatagccaatttgaaccaaaaaaaaaaatcgtgtatacatttatgttgtttcttactatttacctttcaatcctttgcactgactccaatgaattgacatcagaaatctgtgctggagtcaacaatgaaaggggatgtcataatatatattggagatgggaggaattcaggtttgtgaaattcagtctcagaattattcatgggaaaatagttttctggacactgattctaaaattctttctaaaaagttgggttttaagtaagctaagtcatatttaccatatcttttagattcaaggaattttgttgttcaaataagttggtcatatcaccgctccatgtggcaaatctctaatatatttttgcatttgatgtttgaagtaaaatgcagcaaccttacatagagctttataataagcttcatgtgttcaaatataattggtacttttataactgatgctgtttgtgttatactcagaaagttacttcttatcgtaagattaccaatatagtcaccaaaatatttttttatattttgaattaattttccacatttaaataaaacaagtgctgctgctgttgttactattcccttttaacgtctccccaaattagtgttttattctgtatactttatgagatggcagcttaacaatacccttaatatggcccaaggattctacaaaaggaaatgctggtgtgtttgtcaaaagtgttttctggctgggcatggtggctcaagcctgtaatcccagcactttgggaggctgaggcaggtggaccacgaggtcaggagttcaagaccagcctggccatatggtaaaaccgcgtctctactaaaaatacaaaaattagctgggcatggtggtgcatgcctgcagtcccagctactcgggaggctgaggcagaaggatcacttgaatccgggaagcagaagttgcagtgagctgagacagcactgctgcactgcagcctcgatgacagagcaaaactctgtctcaaaaaaaaaaaaaaaaaagtgtttcctgtgcagattatctgttcaccacttgcagatttgaagtttactaagcatgtgtgatatctaaaagttcatttgaaggataagtttcaatgccaaaaatgtttaaaagtgggatataggaagatgatgcaaagatggaatatccaaacatttccattttcaccaggaggacttaatagaatgtctaacagctacttttagatatttttgaaatgtgagaggggtgagttaacacaaaagtagactgtgagattaaaatgtctgttcactctaaaatctcagcattcactttcttattgttaagttattcatcagactcttttcagagacaacctaaatgcaagctcttagaatattacaacatcttttatatgagatgacaggaaataatttcatggccttttaaaggatagatgagggaattgaataccactttcagattaagtaactcctctattgaatattacactgttttatggttcatatctctattgtggttgagaggtattgccagatttattcgctgacaagtaaatattattcagtttataattaatatccatgttggggggagatactttcagtctatgttaaaactattttcaatgttcagtatcctgttccacataaaactttcatgccctagttttagcattcattgatttttatgtgaatcagttgtaactgtgatcattacaaaatggtgattttttttttaaaaaaagtagtttttctgtgtttaataagtatcattctattataaggagagctattcctacccctatttgttcactattactatgaacttataaattcttacattatttcaatgaattacaatcctttctgtcattatttattttgatctttaaatggtctcatatttggccagtgggactccctaaaagctagcccctgtgtccttttgacttgacatgttcccatcactttttgagcatttccccagccctggaatcagccatttacccaaagaacctcatgccctttagaaaccaatcaatattttgcatttggtatgctgattgccattggctcattgctacttgtaggcctttttaatatctagatgagagtacagatatacatattgacatatacagatatatgcacatatgcaacaattttaatatgtttaatacacagtatatacatttatatgtgttctgtaaactatgtattattgttttgcctatatgtttttaaatttacttaaatggtattaagttgtatctcattttgttagttttttgcatagtaacataagattattcttcttgtgcatacctttcgttgttgcttttaactggtatgaaaaattgcacagcatgcatcccctagtgaggaacacatatattgcttcctaccatttgccttcacaaagagtgccgctaaataattatccttatgccagacccctatagacctgtttgagtatttctgtaggaatatgaaacaggacttgatgggccatgggattgcatattttgaatttgactgaatactgcctattgctctcacaatggttataccagtctgcatctcctgaataatgcatgatggttcctacacatacacattcacaacaacacttgacattatcaaactttccaatttatataatcagtctaatagatggtaacatattgcattatgttttactttgaatttatgtgataacttatgaatttgagcatcattttatgttcttatagcatttgggatttcttctgtaatggtccattcatgaacttagcccgtttttccactagtgttcctatctttgtcttgttaatttacgtgtgctgtttttgaatattttatattttagaataagttaatcaaatttcttttaaaattatgtttaattttcaaagtgattatgttacatctgtaaacaatatagcaagaattcactctttttagtaacattaaaaacatggtgttattgtttggagatttgtacccccaaaccgtatgttgaaatttgatccccaatgtcggaggtggggcctaatggaaggtgtttggaagatgaatagattaattccctcccttggagtgagggtgagtgagtactcactctattagttcttgcaagagctggtggtttaaaaagagacaagcggcttcccgcaccttgattcccctcttgccatttgatctctgcacgtgtcagttccccttcatcttccaccataaatgggagcagcctcagaagcagatgttggcatcaggcttcttgtgcagcacacaactgtgagccaaataaacctcttttctttataaattacccagcctcaggtatcccttatggcaacactaaacagactcagatgcatggaatcccattcaaaagtttggactatcgctttatgtattcaaatcatccttcatatcagtttgagacattgaagttatgtgctctaatccgtcatctgcctgttagctttggcattgttgttcttcattctcttcatgaaataactttttgccttattattttacttttgaagtttgaaattttcccactttcagtctacaaaggtaatttctaatcctcatagttttaatttacacatttaatgctttaatctacttagagtctacccttcaatatggtgttaggtggggatttggtttcatttgtctcccagtggtaggctgattttccaaataccatctatgaaacagttcatcctttttccttgtttatgtaatcattgtcaatgacatatatccacataggtttatctctgagctcaatattttggtccattgatacttatggcatccctacacctttttttattagcatgattagttaagttattaatggagcctttatatgttgacatagattttgtagtaagtatgtcaatattctaaaaaattttgaaaaatacctatgtgggccctgtggtgtttgggagagggaagggctttaaatactaggttgatttctttgttacttgagtattctatttctatataaatatattttcttgcactaatgttagtgttttatatccgtctaggaatttttccattccatctaagttttcacatttattagcatataattgaataatcttattttaaaaaaatttagttgtgttctagttatgctcccttcttgtacattttatttggatattcactctgtttgttcttgattattattgccacaggtctattgtagtaatctttgcaaagatacacacttttgttttgttaatcttctccacggttttttcttctccagttcagtgacttatgcttacctccttatgttttgcttccttattactccatagactttgccatgtgttccttttccaacctctctacttaaatgtgtactctttgcttttaaccatcttgacttcttattaatgcttatatattggtaaattttcttctaaatattgcttcattgtatcctacaaactttgtcatgttattatcaatcagttcttagtatttaaaatatttcgtgatttcccttttaacataagaggcattcagtaatgtgtaatttagtttcaaatgtgggttttttaaaaaaagctaatcatattacaatatattcagagaatagcaatatgatattgatcctgtggactttatcctgtggaagctttctttatggtacagagagctatgatgttggtctgtccttgtgccctcataggtcttttgctgtttctagaaggtgttagaattttctctttgtctccattagatacttaaagctgatatatttcttctttcttgaattttgggaaatttatcatcataaattttcacattttattttgcatttttagttttcatttcttcttagatttccatattctagatgttagatagctgtttttatcctccataacattcttctttagtatgttctctttattcttttctactattttctgggtaagtttctcaatctaatcttctaactctaaattaattagcttttcacatgtatccaaactactatttatccctcaacaatttatattttttgacagtcatacttttacagttaaggctttctcttttattttttcttacgactcccattctcatttcatgtttcaacatcttcctttgtgtcctcttatccttaagaatatttgtcatgcttactttaaaatcttggtcagtgtgttccagtagttttgctacagtcggtatgttgttgttcagcttgttgtatttctttttcagtagttgtattcctcagatatctaatcatgttggtttgtgaactcagattttttgtggctattggctactctggtcatttgtattggggaaggactgaaggacaatctcagtctgctgctgttcttgcaacataattattaatagcacccactttttcctttcaaaagtgtcctggtttgggcaggaattatatagtcagtctcactgaaatctaggacgtaagctgtgtcattgtcagtaagtttaaaatgaagagaagtgatgtgccccagggtagagagtctcaggaaccatgaaacactgaccaggcaactcctctgggttgtgaaaaggaaaagctttagacaaggtaaatttaagagtttaatagtgcaagaatgattcgtgagttgggaagcttttagaacgagaacaagttctgagaactgcaagctggcaatgtggccagacagcattatggacagaaaatggaagtgaggtccagaaacagctttgttgtttacaactggttacagctggatgttttgtcttatttgaatcagtcagccacccgcaattgactgaagctcagctgctgtaattgactgagacacagctatctgttacaagtgtatattctattcataattgtgctgttagtttacacactaggttagcttgcagtttgttgcataaggactcaagtacagaggcaacctcagggaaaatttcatttaattaaacaactatatcaccttgaagctcctgaacaaagcagcattggaggagacagtctctctggtttgtaacctgggctttggagatgtaggcaggtggaggagtgaaggcccaaggatggctcttcagcccttccctgttttcatcagccagcctaatgctctcctaattttactgtaactactcctgggtagttgctgttattgtctatggagacaggcagggatggtcactgttgtttccaaatggctaaattgcatgtgttttgtttgttttgttttttttagaacagctagtttattagttgtagggttattgtagctaatttgaataaaaattaagcctacaaattcacatggtatttgattatgtacaatttagtttaattctttagctctgacccaaatgaagtgatatcactaaaccatgatggagtcctcagtgaaagtgaaatgatatcactagcctataatggagccatcagtgaaaggtgttatgtgtgtgtatgttcataaagatacacacaaatgttaactatagagtttcttggacactgtttctgaagtactggtagtttcagcttctgtatgtaacatccttttctttttgggtctagttggatacaagataagtagatcacaagaagtctacttcttcctagctgagttgactagtagctaaaactttcagaaaactgttggattgcctgtgtatgagattctaccaggttaggctatattagtttctagggctgctttaaaaaagtatcacaaaccaagtggcttaaacaaaaattaatgatctcatagtcctagggactagaaatctgaaattgaggttgtcagtagggttggctttttatgaaggctataaggaagaatctgtttgatacctctttgctagctttttctggttgctggcaatctttggcattccttggcaggtagactcttgtctagagtaactgcagctatttgaccaaaagtgtaagtccaaattgtgtttgtatctgagtaatatgcttttataattccccagcccacagccaattgagttgatggtagtaacctatgatagagccacccatgaaatgtgaattagaaacaaggatttatatacaagtaagtgtatatatacatatatacacataacatacacgcatgcatacacatacacacacagaaacataaaacaatgaaagagaaagagaagttgatatttgtaaaattcactgtcaggcatatccttggaaatacagaatatctttgacactatgtctaaatcttctcactgtaggatctatagataaccttctattttttttttcagaccaaattggataaaagaggatgaagtcatgaaagggatgcttcttcctcttagtatatttgtcactctaagttagtagtatccaatcccttaggaacctctgaggttttccatttatgagactctcctactactagagtgggccaaagggagagagaatcctatttggagcaatggggaggtaacaggtgacggaggagtgaagcactcagcaaaaagaacagagttcatgaaaccgtaatgggttcctcaccttctagcgttctaccaccatgtgaggctggtgccccaaacccaaacccacaatcattttgtagggagttcctgactcaggcctacagctacatggtcatatcttctgggcaagaaagacagccatgatgggtgaaagtaaagaagtgacagaaggacttaggaatcaagaatttagatggggtaagaggcatgtttccttacagactgcagttacattagaaataaatgccactggccaggcatggtggctcatatctgtaatcccagcactttgggaggccaagacagctagatcacttgaggccaggaatttgagaccagcctgaccaacatggcaaaaccctgtctctactaaaaatacaaaaattagccaggtgtggtggtgcatgcctgtaatcccatctactcaggaggctgaggaaggagaattgcttgaacctgggaggtggaggttgcagtgagccaagatggctccactgcactccagcctcggtgagagtgagactccgcctaaaaaaaaggatacacctagttcaaattagtgatatacacatgaatatttaaatgtcaaccagatagtacattgtagagtaactgtagctgtttgattcaaaaagtaagtttagaattacatgtgtgtccaactatctacttttatattcctttagcctgcatacagaattgacatcaatgacctatgatagaaccaccaatgaaatgtgaattataaaatatatatacacaaatatttaaagaaatatatatgcagatatacatacttctgtctatctagacacacaaacacagggagagagagaaagggagagaaagagaaaagagagagagaatcgacagagagaaagatgaagattatgtgcttgcgctcaggatcatctatggccatacagaatgtcttttacactgtttataaacctcctaactataggccctgcaggccccttatccaactttttgattaaattggataaaaaaggaacagggcaaaaaagggaaacttcttgttattgtcttgtcacccttagtagcaggcacatacttaggaaagtcagatttcctgtgtatgagacatactagagtggaccaagggaagaaaaccctatgcagagcaacaagcgagtagcagtggacagggagcagcggggcccttagggaaaacaaacagagctaatggccctggcagggttcctcacacccagagctctaccaccatgtgaggctaacactacaagcccacacccatcatcacattgtatggggcagtttcttgaccctgtgtgagagcagagaagacacctataatggcaaaaacaaggcactcatgaagggattttagtgtcaggaaatgagatggggtcaaggggatttgtatatagaaactgcagctgaatttgaaataaagtaaaccatcaaatgcttagtttgtgctgtattcaattgtaaagaactaaacatcgcttgtgagtaattcaaaccagaaagtgaagtccagaatgtcatattggtgttggacgatacatatatatatttaaattctgtagcactgccaagtctaaattcaaatcagtaccctggaatggagctgtcagtgaactgtgagacagaaataatatagaggctggccgtggtggctcacgcctgtaatcccagcactttgggaggccgaggtgggtggatcacgaggtcaggagatcgacaccatcctggctaacacggtgaaaccccgtctctactaaaaatacaaaaaattagccgggtgtggtggcgggtgcctgtagtcccagctactcaggaggctgaggcaggagaatggcgtgaacccgggaggtggagcttgcagtgaaccgagatcctgccactgcactccagcctgggcaacagagcgagactccccctcaaaaaaaaaaaaaaagaaaaaagaaaaagaaataaatcaatatagatataaggatatatgaacaagggaggaaacgattatataccatttatatatacctatatgcattcatattaaatcaaggcatgcacccacaggtacagcagagaaatataaaggttgagattagggaagttcccattcaagggcattaatggaaaaacaaaaaactttgacacatgtgtctgcatgatctcactataggatatgaaggtgactttatgtcttgaatgaatttagataaaagatgaccacataaaaagaagaatgatttttcttactagtctgtttgatactcttgagtaaaaataaaaactaattttcagactgcctatatgtgagaccttactataatggctgaggacagcagagaatcctctttggaaacaggaaaggacagcagggacggagagtagtgaagacctcaggagaagagaaaaaagctaacaaccctagaaatgtttttgaccctgcagaactctgccacaatacagggtggtactcaaaaccccaaataccatcatattggattgtgtgcttgactcagacctgcagttactttaccgtacttgtggaccaacagagacaatcaagtgaagaagtaatggagggctttcgaggcagcacatttagtggaataagagggctgactacctccacacaaaagtttagtttgaaataactgccaccacaaaggctgtcacgcattgggactgaggtcataataaagaggtttatttaaatctgaaagcattactattttccccagcctaagatgttggttgccatcatataaatcctcctttttaattaaaaaatgacatttcagaaccaaatagtgctatacacatgaatagtcagaacttaactggtttatgtgcagattaatgaaagctagttttaccagaaaagtaaattttgaattgtgtctcctgtctgactatattcttttgacatcctctagtccacccacaaatgaattatcaggagtgaacccagaggcacgtatgaatgaaaggtgagttatgcgtacgtgtgtctttatttatcgaattataactgagcatagaagtattcacagacacaggcacataaacaaatatatccatccatccatccatgcatccatccgtacacacttctctcaaacacatccactaacaaatccatgcatacagtggaaacatacaacaaggagacagacggccggacatttgtggagtttattctgggaagcctgcgtggccatagagagtggtttttaacaggatttccaattcttctcctagtagcctttgtaggtaacattgcttccttttctaacggagtgatataaaaaggagcaggtcataagagagctgctgcttcctatgttagtgtatttgtcactgttagttcctagtaagcagcagcttaaaggactcagatttcctgagtttgagagcctaccagattgacagaaaggaggagaaaatcctatttgcaacatggaggagatagcagctgacaaggagcagtgaagccctgggcagaaaagaacagagctaatggaacatggacttgtccctcacactccagagctctgtcaacatatgaggttggtgctaaaacataaacacaagcacaccacctcattggatgcagccgttccttaggcccacagctacttgcctgtgtcccatggacaggaaagactagcatgatgggtgaaaggaaagacttgacggagagatccaggaagtgggccatagatgggattaggaggaggaatgcctacccagtggagttgaatttaaaagaaattcacccacaaaaggctgtctgtcgtgcattggccagctccagtggtacagagttttggtgaactcttgagtcagtgagtcttagatagatgtgctgcaatcatataaagtatgatgtgtagggtaaatggcatggcagattccaaagaaccaaatacacacatgacttctctaagggtaaggcaatttacaggttgaaaagtagttggaaggtcgggtgcggtggctcaggcctgtagtcctagcactttgggaggccagggcgggtggataacgagatcagtagttcaaggccagcctggccaacatggtgaaaccccatctctactaaaaatacaaaattaaccgggtgtggtggcaggcacctgtagtccctgctactcgggaggctgaggcaggagaattgcttgaacccgggaggcagaggttgcagtgagccgagatcatgccactgcactccagcttgggtgactgagtgagactctgtctcaaaaaaccaaaaacaacaacaacaaacaaaaacaaaaaaccaaaacaaaagcaattggaattattttgaactgaaaaccttaagtctaggaagttacatgttgtcttagtatgtacatgttaacttctttggcacggccctgtgtgtgaattgagagtaccttctagtaggctggccaatgcaccatgtgataccaaggaatacagttatacatgtgtctatgcatatacaaacacatacatacatgcattcgtacacacaagagagactgagtagggctattgagtgtgacaggcatccatgggaacaaggagttcccttgaaactatttctagagtcctctcagaatgagctttgtatgcaatattgttttgttttttggatggaggtaggaaaatggggaggaactcatagagggaggctttttatgttagtgtttgtcacattacctttctgtgagaatgagactttcctagtagcatgaaccaagggagaagcgaatcctgcttgcagggagaaggagataggagtggacaaagatcagagaaatcccagccaaaacaaagaacagagctaataaccctggaattatttcaccccctccagagctctaccgttatgtgaggctgactgcctttgcccatacccactctcacatgggatggagcccttgcttgaggcctccagctacttggccgcaactcttgggcaggagagacaactaggatgggtgaaaagtgaggaggtgattggaggtgatagagaatgaggaactcaaatgggattataagaagggagactcaggaactaaatttgaactagaattaaatgctctccaaaaatgctgttacaccttgaggtgtagatacccttacttaatctgcatgcatcgctatggtcacagcctaaaatgctcactgttggcatatgaaacctcatttctaataaaaagacaaatgccatcccaggtcaatttagtgatatacatacatgtgaataataaaagtgtaactggggaatgacacatagactaactgtagctatttgttgcaaaacattagaattacgcattgggtctgactctgaccatatttgtcctttagtcctgatccgactgacctggcgggagtcatcattgagctcggccccaatgacaggtgagttataaaagatgtacacatgaccaggtgcaatggttcacacctgtaatctgagcactttgggaggctgaagcaggccgataccctgaggtcgggtgttcgagaccaggctggcaaacatcgtgaaaccctgtctctactaaaactacaagaactagccaggtgtggtggcaggtgcctctaatcccagctactcaggagactgaggcaggagaatcgattgaacctggggaagtggagtttgcagtgagctgagaacatgccgctgcattccaccctgggcagcaggagcgaaactgttgcaaaaatgaaaaaaaaaaaagatgcacacacacacacacaaaacagtgacagagaaagagaccgagattagtgggattaactctcagatgtgttcctgataatacagtgtttctttgacacaggttctttatcatctccctgtatcatgtatagataacttccacatttttacattgtttagaaaaaaagaaactgactagagagagaggcttccatctgttactgtcttgtcacccttagtaagtagcaggcaaatgctttggaaaagcagattttctgtgtaccagacataccagagtaggcccagggaagagagaatcctgtttggagtgaggaggaggtaggagtacttggggaactgtgaagccttcagcagaaagcaacagagctatgagccttggaggtgttcaccaccctccagaaccctgccaccacagaggctggtgctccaaacctaaaatcaccatcctattggattgtgcccctgtgtcagacctctagttacctgaccctttttgtgggacatgagaaaccaccatgctgggtgaacataaggagctaatggagggccttttaagcaggacattgaatggaataagagggctgactacctacaaattggagttgagtttgaaataactaccaccacaaagtctgtcacacattgggactgaggtcataataaagaggtttacttaaatcgggaagcattactattttcccccgcctaagattttggttgtcgccatataaatcctcattgctaataaagaggaaaagacattccaggttccagtagtactatacacatgaatagtcagaaattaattggtttctgtctagagtaatgaaaggtaatttttccaaaatataaattcagaattatgtctcctctctgactgttttctcttatcatccactagtccacagacaagtgaatttaaaggagcaaccgaggaggcacctgcgaaagaaaggtgagcaataaatagttaaagtcacccgtcagcataagtgtgcatagaactatacacacacaggcacatgagcaagtataccccatccatccatccatccatccatccatccattcatccatccatccatccatccatccattcatccatccatccattcatccatccatccacacgtctcttcaacacacttacacaaactaatccatgcacatgatggaaacatagaccaaagagaaaggagactggtggacatttgtggaatttactctcaggagcctgcatggccatagagattttttttttttaacagagtttccaattcgtctcattgtagcatttgttagtaactttgcatccttctttggtggagctctataaaaaggagcaggtcgtaggagatttgcttcttcctgtaatgtatttgccacccttagttcctactaagcagtttttttatgggactcagatttctgataggaattcattggtttctgtctagagtaataaaagctaattttccaaaaaagtaaatttagaatcgcgtctcctatctgactgtattcttttttttttttttttttttttttttgagacggagtctcgctctgtcgcccaggccggactgcggactgcagtggcgcaatctcggctcactgcaagctctgcttcccgggttcacgccattctcctgcctcagcctcccgagtagctgggactacaggcgcccgccaccgcgcccagctaatttttttttgtatttttagtagagacggggtttcaccttgttagccaggatggtctcaatctcctgacctcatgatccacccgcctcggcctcccaaagtgctgctgactgtattcttttatcatcctctagcccacacacaagtgaatttaaaggagcagcccgggtgtcacctatcagtgaaaggtgagttataaatacatgaagacacacgtatgcataagagtgcatagagctatacacacaccaagcacatacacaaatatatccatccatcttcatccatacacacttttgtcaacacatttacacaaacaaacccatgcacaaaatggaaacacaaaacacggagacagatggacatttgtggaatttactctcaggagcctgcatggccatacagagtgttttttaacagggtttccaattcttctcattgtagcatttgtagataactttgcacctttttttgatggagttgtataaggaggtcagttcgtaggagagctgcttcttcctgttagtgtatttgtcaccctcaatttctggtaggcaattttttaagggattcaggtttcctgagtttgagaccctaccatagtgttccaagaaaggagagaatcctatttgcaacatggaggagatagcagccaataaggagtagtgaagccctgggaaaaaaagaatggagctaatggaacatggacttgtcccacacactcgagagctctgtccacatgtgaggttggtgcctagacccagcccaaacccaccacctcattggatgccgctttcctcaggtgtgcgggtacttcactgtgtctcatgggcaggagagactagcatgatcagtgaaaggaaggaggtggtggagggttttcccagtcatgtgaaaacctctcctggaaataaatcataaaggtgtaagtaatatggaaaacctgattcaagttaattatagtgtaatgctcaagaaaccttgcaaaatgagattttacagaaggaataaaaggattgtgtttaatcagtggctgattaaggaaacatctaggtgagaattctgtagttgctcattaagcaatagcatgtgagttttgtatgtagtattgatttttaagccaataaataaatttttaaaagaatttattttataggacgttggaggcatgggcgaattaaaatgtatttctattattattgtattttttgagatgaagtctcgctgttgcccaagctggcgtgcagtggcgtgatctcggctcactgtaacctccatctcccgggttcaagtgattttcctgcctcagcctcctgagtagctgggactgcagtcatgtgccaccatgccagacaaattttttgtatttttggtaggggcggggtttcactatattggccaggctggtcttgaactcctgccctcgtgatccacccgcctcagcctcccaaactgctgggtttacggtcatgagccatcagattgtatggaggccctgcattgggtctgtagttacttaaccctatctgaggggcaggaaagacatccatgattggtgaagagttactggaggtatttgaacatgagaaggcagaaaattacaagggcgagcaaggtgggtgtttacaaactgaagttgattttatgtaaattttgccagaaacagtaacttggggattaggtttaggagtaaagaaatgtatataaacttgattcattaagtttttttcacaggccgaaaaatttcattacaaacatctaaaacctcgtttccagagaaaaattaaataccatgtttcaaataaataactgattaatgtccgtttttcaggggaactagattataaattgtggaataattattgctaatttgtgtcagaaaattaagtctaggataacatgtggagtcttgctatgttcatttttaatcctttagctattacctcattgaattaaaaagagtaatgtgtggtagagtcatcaatgatgggtgaaatttcaaaatacggagagaaagaagagaggcatatattaagattggtaaaattcattcacaaatgaagtaatacagaactgcacttaaattgtgattcattagtttgtttgttaaggcccaggagcacctttacataatataaggttttcttctaggaaaaaatgatatattaatagtagattccaaatcattgacatacacattttgaggattcagccagtttataaatgtagagcaaatgtacataatttcaaccagaaaagtatgtctctgaagtcacttgacctgaagtgtacatttttaatcgttagcactggcccggataaaatgacatcagtagtctttcactaatttgatatatatttgatataactcacctttcaatggtggtgtcattgaaaactactgacattattaatttgggtcagtgctaaaggatctatctacacacacacacacacatataacacacatgtatatgtgtgtgtgtgtatatatacagatatatcttttagctatatatgtaatatatatagatatataaatatgtatttgtgtgtatatagatatagatacacatatctatatacatgtctacatatgtgcatatttaaatgtgtgtatatatatctatatatacatatctatatatagatatattctttagcactaacccaaataacatcagtagtcatgtatatatcctttaatatatatatgagcatctgtgtatatatatgtaaacatatatgtatatatcctttagcatatatatgtatatatacacatatatagtttatatatacatatatgtgtgtgtatatgcaggtatatcttgttttattgtgctttattttattgcccctcagatattacttttttgtaaactgaaggtttgtagcaaccctacattgagcaagtctcctggttttatttttccaacagcgtgttctcactttgtgtctcttgtcacattttaataattcttgcagtattccaaactttttattatcatatctgttatggtgatatgtgatcagtgatctttgatgttactattgtaattgttttggggcaacacgaaccatgtccatattaagatgacaagcctaatcaatgacatgtttgttgtgactgctccactgactagccattcccccatctctctccttctccttgggcctccctattccctgagacacaacaatattgaaagtaagccatttagtaagcctatgatggtctctgagtgtcctagtgaagggaagagtcacatgtctctcactttaaaccaaaagctagaaatgattgtgaggaaggctagacttcttgcaccacttcagccaagttgtgaatgtaaaacaaaaacaaaaacaaaacaaaacagaaaagtcaaaaaacttcttgaagaaaattaagactgctactccagtgaacatacaaatgttgagaaagcaaaacagtctgattgctaatatggagaatgttgtagtggtctggataaaggatcaaaccggccacagcattcccttaagccaaagcgtaatccaggacaaggccctcactctctttgattcagtgaagcctgggagaggtaaggaagctacagaagaaaagcttgacgctaaaaggtttgttcatgaggtttaaggaaagaagccatctccatcacataaaagtgcaaggtaaacagccagtgccgatgcagaagcagcagcaagttatccagaagatctaggtgagataactgatgaatgtggccaaactaaacaacacattttcaatgtagacaagatagccttttattggaagaagatgccatctaggacttttatatttagagaggagaagtcaacgcatggtttcaaatcttcaaagcacaggccaattctcttgttaggggctaatgaagctggtgactttaagttgaagccaacaatcattgactattctgaaaatcctggggcccgtgcgaattatgctaaatcaagcaagatgggtgactagagatgtctggtgctcatctcccctacaagaaagaaccgaggcaagaaatacacatctgagatttgattagagtatcaaagggatagtcctggagtgcagcaaaggagtggagacacatctgtggtgactgaaagttgccacagcatggaagcactcagcctgtgcagccccttctgccccatctggattgaattggcccagagacaggagggacttctcattgcagggtgaaggtaggcagaagatccccaccagccccactgccatcacaaacacaaagtctttacaacaggagaatctcacagtctttgcaagccctcaggccagtttggagtattgccaagaattgacacagctgcatgtcctggactaggagtacaaggtgaagacttcccacccccagaggcttaagctgcagcaacacagcaccatctggagaacagagtcatctcttgagtgtgccctcctctgggggccagtagccactgtgcctctccagcactggagctttatcttcagtacaccaagcccacatgggtgggttaaagccacaatcccagctgtgtggaggttggtcccaggactggctgtaactcaagtaatgcagagcagggaaatcaacccccaccaccacacttccagacagaggaataatctgcagtcccatccagggtaaattcactcttaagacagccaaaccactacatgccctctcccaagtgggagaggcccctaagcctctgagcagctgatacacccacaggtcaacagagtgactatgagcccatgctcaggacctgagaaacagccttgcgggccccatcaaccacagacatgctcctggcgtgcccagtagccctctgcttttaataagggcctgagaaacagtcccacaggctgcccccagcaggcacaccaccgagtgggccttgcacctgtatctcagacctgagagacaagcaactgtgtatgcccaagtctcagggccgagaaacaaccctgggagcttactcaggccaactaagcagccatatacctgtgtcccagcttgaggaacagccctttaggccaccccacacagaaacactcccaggccaactaagcagctgtgcaaccttgggtgagcctgagaaatagtcctgtatccattcccagcagatgcacctccagaccagccaatcagccatgaatgcccatgtcctggacctaagaaagagctccatgggctactcccagaagacatgcccttaggccagccgagcagcctcgtgtccacatcctggctcacagaagtagtccccagggcttcccctggcaggcaccacccaggccagctgagcagcagtgtgcacacatcctgagctagaatagctctatggactacccccagcagacacatatccaggacagctgagaagtcatttgactgtatcccaggcctgagaaacacccctcttggccagccctggcaaagataccttcagtccagcttagcagctatgcacctatatatttggtccatgagtttcccccagcagactggccccaggccagatgagcagctgtgtacccacataccagttatgggaaacagcccttcaggccactcctggagtgcatgcttccaggccaggcaaacagctgtgtgcctgcatcctgggcctgagaaactgtcctgcaaagcacatctggaagtcatgccctggttgagcaactgcatccccatgcttctggctagagtgatggcaccatggccagcggcataaagccatactccaagttttctgacccactctatgcctgcacacacccttaccctgagaaacagcccagtgagcccacccctggcaaggctgcaccaccatcactacaaacttccttaacctaggccactgagtaacttgcaaatgttactagtgtggatcacagctgaataaactacatggagactacacttactgcatccatgtagaaccaaggccggtataccccaatgaactgacatccaagacccattcatacaaataaattcatacaattttactccataaaattggaaaaggtgactttttcaccagatgcgtagaaatcaatttagaaacacagcaaccatgaaaatgcaagaaaacatgtcacctacaaagggaaataataattatccagtaatagaacctaatcataaacatatgatgtgacagaaaaaagaataatcttaaggaaactcagtgagatgtaaggtaatacagatagacaagtcaatgaaatcaggtgaaagagaaattcagtaaagatacagatatcataaaaataaccaaacagaagccctaagagctaaacagttcaatggatgaaatgaaaaaatacaatcaatggctttacagacaagaacaagcagaagaaataatttctgaacttgaagacaagtcttttgaaataacacagacaggcaaaaaaaggataaaaaagaatgaaaaaagcctacaggatttatgggacaccattaatttggtcaaatattcatattatgggcattccagaaggaaaagagtagagaaaatatgaggaaaacatatttaataaaatagcgtaaaacttcctaactcttgagggagagctagacatctagttccaggaagatcaaagaaccccaaatacattcaacccagacattatagtcaaattgtgaaaaatcaaaagacaaagattttttaaaatagcaagagaaaagtaacacacttataatggaatccccattagactaacagctgatttcccagtggaaaccttaggctagaagagaatgggatgatacattcgaagttctgaaagaaaaaaatctttcagccaagaatattatagccagcacagctatcctttacaaatgaagaagacataaaatctgtcatagataaacaaaaaccaagataattcatcaccactagaccaacattacaagaaatgcccaagggagtcttacatctggaagtaaaaagatgataaccaccatcatgaaaacatgcaaaacctcctcacctaccaataataactttgaatgttaatagattaaataccccatgaaggatatagacttactgagtggattaaaaaataagaccccactatattttatctaaaagaaactcactttaccggtatagaaacacatagactgataataaagggatggaaaaatatattctatgcaaatggaagcccaaagtgagcagggatagctatacttgtatcagacaaaacagagttcaagttaaaaaccataaaaattgacaaacaagattattatgtaataataaagggttcaattcagcaagaaatataattgtaatatgtgtataattgtaaatatgtatgcactcaaacaccagagcacctagatatataaagcgaatattactagatctaaagagggagatagaccccattacaataagagttgggcacttccgtatcccactctcagcattggacaaatcatctagacagaaaatcaacaaagaaacatcagacttaaactccaccatagaccaaatggacataaataacaaacatgtacagaacatctcacctaacagctgcagaatacacattcttttcatcagcacatgaaacattatctaagatagaccatatgttaggctacaaaacaagtctcaacaaatttttaaaaattgaaattctatcaggtatcttatcttaccacaatggaataaaactagacattcataacaagaggaacattcaaaactatacagacatatggaaattaaacaacatgcccttgagttacagtgagtgaagaaagaaattaagaatgaaatttaagaattccttgaaacaaatgtaactagaaacacaatataccaaaacaggggacgcagcaaaagcagttattaagaactatgtttttagcttcatccgtgtccctacaaaggacatgaactcatcattttttcagcaaactgtcgcaaggacaaaacaccaaacatcacatgttctcactcataggtgggaattgaacaatgagaacactcagacacaggaagggggacatcacacactggggcctgttgttgggtagggggaggggggagggatagcattaggagatatacctaatgtaaatgacgagttaatgggcgcagcacaccaacatggcacatgtatacatatgtaacaaacctgcacattgtgcatatgtaccctagaacttaaagtataaaaaaaaaagtatatttttagcaataaatgcctggatcaaaaaaactagaaaactttcaaataaaccactgaacaattctacctcaagaaactagaatagtaagaacaaaccaaaccccaaattattaaaaggaaataaataatgaagaccaaacagaaataaacacatttgaggcaaaaattacaaaaggttaacaacaaaaaggtttaaaaaatatcaacaaaccattagctagactaattaagaaaaagggaagacccaaataagtaaaatcagaaacaaaaaaaaagagacctcataacagataatgacagaaataaaaataattattagagactattatgagcaactctacaataaatttgaaaacctagaggaggtggacaaaatccttgacccatacgacctaccaagactaaaccaagaagaaatagaaaacctgaacagaccaaaaacaagtaatgagattgaatcagtaataaaaaggctttcaacaaagtccaggacctgatggcttcaccacttaatcctcacttgtgaaaggaagagccatttgctacagcaaacttcattgttgtcctattttaagaaattgtctcagccactctgaccattggcaaccaccactctgatcagtcagcagccatgaacatggaggcaacgccctccaccagcaaaaggtgatcattagcattttttaaccaataaagtagtttttaattaaggtatatacataagtttttcgaacataatgccattgcaaacttaacaggctacatgtagggtaaacataacttttatatgcacagggaacccaaaacatttgtgtgagttgcttaatgcagtttttgctttattgcagtggtctggaatgaaacccacaatgtctttgagatatgtctacacacatattatttatatattatatatccatatacatattcttttatatatctttatatgcatatatatagaaagagacagagagagaaaagaagataaaaatatgcaaaattcagtgttgggagtatccatgaggaaagagtttctggttaatgattgtaattttctctcttaaatattaggtcttccagtgagctaagtcatgtttactatatcctttagattcatgggattcttgctattcaaatatatttttcatcactattttgtgtagcaaatatctaatgatatatttttgctttttttttggtggctaaagtgtgttagcacgactttccaagtttgaagttgaagatgctgaaaatgttgcttcatatgagtaagtcagtttgaagtttgaaaggagggagccattgatggatctcttatctttagttaaacagggcttccgctgaggcaagaaggaaaaagggaaactatggaaagatatcaaaatgtatgggtgggagtgtacaccgtatttactccagttgaattcttagacaagtattattttgaaaaaaaaattccatccattcagaaataaatgttcttctagcttgaaaatgtaaaaagtattcttagaggaaattaattccattaaaagttttttttaaaaaaacaggaatgcagaatgctacttaactcatcaatagtgaacgtttctcatttttactagatatggtgtgattcccaattttgtacattttgcctatgagcaaatagtattgatagcaaaagcaaacatattttgctgactaaagacctctttatgctcattgggattttattcttatttgtttctaatctcactagagtacttcctgttgcactgacctgaaggcattttatcatgtactcactgtaatgaaacaatacattcttaaactggcttgtgtctgaactgcagacatattcaggagatttttcttctgcttctttcttgcccagttgtataaccattcaccagcttgtgtcaatgctggagaggaagtactgccatagaggaagttaactcaccatggttgtaagctgttggtgtctaaacaaagagggcaaataaaaatagttcttcaaattaccctgaatttgccactgaattaaactgtgtgtctgcagattagctatacgttttctgtaatggagctgcccagggctgaaacaaaattagaccgattaagcaaggcaagcatttccttctttccccactccaaacaaaataaagcaggttttcattttattttatttttaaattacaaagtctcattacatagatataggaggaatttgcagtagtccctgtgagaaatgctggtgtttcataacagggggatgatattggatttatagtaaaagctggaatcagtgcttgcctttggcatcatatattcattcacctgatactcagcaagtcactaaccctctttaactttcagattattcaaatgtaaactggctataatgcaatccatgtactggatattgtatttaaaaaattagtaataaaatgaaaataacatgcaaaaatactttgaaaactctgtagttctgtaaataggttttattctaaaaactaaaaataatgtaagagttcattaaaggaaaatctgaaaatacaatcaacaaatctacccacatttagtcattcttaaactttgatgcatgcacttctaagttctttaagcatatactttttttgtttacagatatgagaccatacttattcttttgtaaataaccttattaatgacatcatggctatatttttttgttaatatatattcatgtgcacttacaacattatttgtaacagttgtgtgatatttcatggtgtagatgtgctataattcatttaatagtcagatattgctgaacaattcagtttttttacaagtttttaacttacaaaaatgaatatatttgaggctaaatctctgtatattgttggttatttgcttgttataaattctcagaagtggaaattctgtgtcaaagggaatgattgtgacgctattgatattgatatgtgctttaacatcaagatgcaaagtgtacatttctcccctcccacacttaacactagccatcattgatttctctgatattagtaaatatatttgttctaatgcatgttctttgacacaccttcatttatccttttctgtctttggactgaaaagttaaatctattgatcctttttctattttatgtaatataagcaatttctcccaggttgtcttgcttttcactatataaaagcatttaatcctcatgtaatcaaatgtatctgtacttttctttgtgattttgcctttaatgttattctcagaaagtccttctcaccccaagattttaaatatattcaccaaaatttctgttttgaatttattttcttcatttaaataaaatatctgccctgaatttactttgtcttaaggtataaagtgtagaaatttacttttctcctaagtgactcatagttttttcagcatgaacatgtcatccctctgtattgtccttaccctgttttagtgatctagagtgagcaggaagaccagagtcactacagtgtttttcgtgctttgcatcatggccacctccctacccccagagtctgcacaagagaaaaatgtgtccagtgggagagatagcacctgccttcaatacaaatcccatttcattaaacatggtcttgttagtgtcatgtagcttccaccttctattgataaaaaatgagtcattcatgttcatagttaatatttctgcttttaattcaactttgatattattggaactttcagtgtattaaggtttagtatctcatatctttttttctctcttttttttttgagccggagtctcgctctgtcaccaggctggagtgcagtggctccactcagctcactgcaacctccacttcccaggttcaagcgattctcctgcctcagcctcctgagtagctgggactacaggcatgcaccaccacgcccagctaattttttgtatttttagtagagatggagtttcaccacgttggccaggatggtctcgatctcttgacctcatgatccacccaccttggccacccaaagtgctgggattacaggcgtgagccaccgcgcctggccgctatctctttatttttgaattgtcatttaaatttagtttttgtctctcatgtatagcatgtaatgcctttaatttcaaagttatctgagagtatttctcaatatgcaatatgagagtaatatgtttgtatttatgatttctggtacgtttggttttatttatcatctttttctttattaaaaatactttgatattttctttgtaaatttgtctatgttttgctattatctgatttgttttcatcccttgcattttttgttgatatgcaagtcagaagcccatttctagtctatcaatgtttatatttaaatgtttagaaaacataattataccattttttccatcaatatcgagaataaaactggactcgtacctgtgaaagataagaaatgcaacctgcctttacttctatcttcttccacaccttgaatcctagtgtaagaatgcctaaaaattcaaatcaatactattattcatgattttatattatttatctttacttttagaatcatttatttacattttcacctgctacttttttttattattattatactgtaagttctagggtgcatgtgcacaatgtgcaggtttgttacatattcatgcatgtgccatgttggtgtgctgtacccattaattcatcatttacattaggtgtatctcctaatgctatccctcccccatccccccaccccatgacaggccctggtgtgtgatgttccccttcctgtgtccaagggttctcattgttcaattcccacctatgagtgagaacatgcagtgtttggttttctgaccttgcggtagcttgctgagaatgatggtttccagcttcatccatgtccctacaaaggacatgaactcatccttttttatggctgcttagtattccatggtgtatatgtgccacattttcttcatccagtctatcattgttggacatttgggttggttccaagtctttgctattgtgaatagtgccgcaataaacatacgtgtgcatgtgtctttatagcagcatgatttataatcctttgggtatatacccagtaataggatggctgggtcaaatggtgtttctagttttagattcttgaggaatcgccacactgtcttccacaatggttgaactagtttacagtcccaccaacagtgtaaaagtgttcagtttctccacatcctctccagcacctgttgtttcttgactttttaataatcaccattctaactggtgtgagatggtatgtcattgtggttttgatttgcatttctctgatggccagtgatgatgagcattttttcatgtgtctgttggctgcataaatgtcttcttttgagaagtgtctgttcatatcctttgcccactttttgatggggttgtttgatttttttcttgtaaatttgtttgagttctttgtagattctggatattagtcctttgtcagatgagtagattccaaaaattttctcccattccgtaggttgcctgttcactctgatggtagtttcttttgctatgcagaagctctttagtttaattagatcctgtttgtcaattttggcttttgttgccattgcttttgttcacctgctacatttttgttcttcattttgattcattgctcagctgactcaagcactttgagtaattgtttttaggaaaggtacatggaggctatgcttcgtgttgcttcatgttggagtgtctgtctgttgctcccgagtgtgaacagtacttttcctggatatggatttactgagtcatagttatttccctgcaaactctgcacataactgcttgaagcttcatttacatagtactctttttttaagcaaaaaagtctcaattgtgtatttacttggtatagtttcagggtacactgaaacagattaaggggctaaagccacccaagccacttcttcatgccttcataatctgtcagacttggttctgtatggtgacattgtcaagtgagttcagatttatgacatttccttgatacccagagatctagtagactgtgtgggatcagaggttcttgtagtaagggaatggcaacttgaggagagaattcacctcttttggccaattgatcctccatctacatcagccttaactctccaagcctgggtggaggtggtgggtccaggtggagaggggaagattagaaggattggggatttcttttatctcaggttaacctaacatccttcatcaaaggccaatttttttttttttaacttttattttaggtttggtggtacacgtgaggtttgctacataggtaaacttgtgtcagggaggttgtttttttttattttttacatattatttcatcatccaggtattaagctcagtacccaaatagttatcttttctgctcctctctctcctcctgccctccccacttaagtagaccccagtgtctatttccttctttgtgttcataagtccttatgatttagctaccactgataggtgagaacattcagtatttggttttctgtttctgcactagtttgctaaggataagagcctccggctccattgatgttcccacaaaatacatgatctcattctttttttatggctgtatagtattccatggtatatatgtaccacattttctttatccaatctgtcattgatgggtacctaggttgattccatgtctttgctattgtaaatagtgctgcagtgaacattcatatgcatgtatctttatagtagaatgatttatattcctctgggtatctactcagtattgggattgctcagtcaaatagttctgcttttagctcttcaaggtattgccatagtactttttacagtgattgaactaatttacactcccaccaacaatgtatatgtgttcccttttctctgcaaccttgcccgcatctgttattttttgactttttagtaatagccattctgactggtgtgaaatggtatctcattgtggttttgatttgcatttctctaatctgtgatattgagcttttcttcatatgtttgttggccacatgcatgtcttcttttgagaaatgtctgttcatgtcaaaggccaattgtcagtgccccagttctgctcagtatctgccctctttgttctcccgtcttaggcacaggctgtgagcattgtcttaggattcatggctcttggggtggaatttgagtcctgtgttggaggcttcagtatgacagaaacttcctgaagtcttcttctactgaagcctcctgtgttggaggcttctcctcctgaagagcctccaacacaggaggcttcagtaggacaaaaaaaattgttcctcatgagctaccttgtctccagccataaggtaaaatgaggcattattggaggctccatcaaacaggttctccttcctttgattaatggaaggagcccagtctttcgggtgtttctcctttgaagtatatcttactaaaatgtcttacctctgaagttcgtttgcaacctcatatgtgactcatctgttcactaggtgtctagttcgaggagatgacaagagcatcatttactccctatgctcattcctgaaacaccttattttattgcagtggaaactgagatctggccaaagtttgatgatttgcccaggctggcattaaaatacagttctcttctaccacccttttctgtcttcatgctatactccttgagatgatgaccaccagtttaagtttagtattgccataaagttggggttggggctttgcatgcaatggaaatgttactaaacatccaaactttactgtcttctggatagcatagtaaacaagtaaaatactcatggagcaggaagaataaaattttagctattagtaaaaagcattttgttatacaacttctgaataattttcttttgaaattatatttataagggcctttgttttttggttaaatttacaatatatgttagaagaaatctgattaattttatttttacttctttttgcagcagcaagattaagaaaattgtgcattcaattgtatcatcctttgcatttgggtatgtgagacatagaaaacaccatgtattaaatatatctgagacttggctgggcacggtggctcacacctgtaatcccagcaccctgggaggccgaggcgggcggatcacatgaagtcaggagttcaagaccagcctggctaacatggtgaaaccccatctctactaaaaatacaaaaattagccaagcataatggtgggtgcctataatcccagctactcaggaggctgaggcagaagaatcgcttgaaccgaggaggcatagattgcagtgagctgaaattgcaccattgcaccgcagccttggcgacacagcaagactccatgtaaaaaaaaaaaaaaaaaaaaagaaaagaaaatatatgagtctcatatatatctatatatacatatatatatatgagacttaatacttcaatgagaaatactgaaataaaataacaaaaaagcatttccactgtccatcagttgctaagtagccatgtgccccatctaatgtaatctaatttatcatggaattttggtttaagctggacattaagaattgcaaataaatggcttttgcctaagattaattgtaatatattaatattgtttttcttccatctgcaaaagtaacattaatgaaaatcaaatgttaaaattctataattattagtaaagtgttttattagtaccttatacatcaggaattactctttaattctggaaacaatttacttagactcttctctacataagagtaagatttcatactatgatatagatttatacgatataattgtttccttttgaattaataatatttgaatttgagctgcaagtttttaaaaaagtacttcaaagactaattcacctttatagactaggcaaatagtctaatcaatttatggagaatgtatttagaatatgtaacagcaagtggcaggaggtactttagagttcaagactcatgtgcccatcactctgctagaagcacccataaatatgaaatcatgtacttgttgaaaatgtcactgatgaaaaatcttggtcttttaagagcttatgttactcatgctttcatttggtttttattaataaattctttagaattatccagattaatgagggtttattttttatgagaaattggtataaacttcttatgaaattcgcaaattttaagaagagtttgtaaacagacaggtgattttaattcagttttacttttctctcttgaggtgttggtctgatgtgtttactataatatcttgtgaagtggtttggtgagaattttgtttattaagaactgcttctattgggtgaaaacagtgatttttctgagattctaaggcattacagtttttcctgccactgggcagcttaatactaaataataacattttggtacctgatcagtggcttaaatatagtatagctacagggacaaatgcccctttatctttgcatttatttatttatttatttatttgtttattttagactatttggagttttcctggtcttactggatgtcactctcatccttgccgacctaattttcactgacagcaaactttatattcctttggagtatcgttctatttctctagctattgccttattttttctcatggatgttcttcttcgagtatttgtagaaaggtaagtttgattatttttataatgcattaagctactttgtagttttataagaagcactttcggaggctgaggtgggaggatcccaaggtcaggagttcgagacgatcctggccaacatggtgaaaccccgtctctactaaaaatacaaaaattagctgggcatggtggtggttgcctgtaatcccagctgtttgggaggctgaggcaggagaatcgtttgaacctgggaggcagaagttgcattgagccgagatcatgccattgcactctagcctgggtgacagggtgagactccatctcaaaaaaaaaaaaaaaaaagcattttaaaataattaacgggagcattcactacaaactgacttaagagcctttgggccttatgagaacattggtggtagtctggcagtaccccccccatgtcctgtgtttgaggtggccatggattgatgctcctctgcctttggacaggggtggaaagagtgggaaggactgcatcttgtggtttgagtgacagctcagccatagcacaataaaacactaggtagacttttacagtttttgatctaggccctgattcccagacagcacctgtggatccacctgtaggctaggagaacttgccatcctgaaggcaaggacacaggcctggctgtttttacgatgtgatgactgtagagccccagggccttcagtaaactcctgcaatagctaaggagtggttacagcaggtcttgggcaagaccccgtgctgtgctggcctcaggtctgacccaatgcagtcacagtagtggtggccacagaggtgcttatgtcactcaaccccaagctttaggtgcctcagaacagagagagagactctgtttgtttgggagaaagtaagggaagaaaacaagagtctctttttggtaatgcagagaattatcctggatcttgtccaagaccattaaggcagtaccactatgagtctgcaagaaccagagtttaggaggcttggggtgccccctaaagcagatagagattagatcacagtatccaagttctttcaaatatctggaaagccttcccaagaaagatgggtacaaacaagccctgacagtgaaaactacaataaatacagtgaaaactacaatcaatacctaactcttcaatgcccagacaccaaagaacatctgctagcatcaacactatccaggaaaacatgacctcaccaaatgaactaaataagacaccaggggccaatcctgtagaaacagagatatgtgacctttcagacaaagaaatcaaaataactgtgttgaggaaggaaactcaaagaaattcaagataacacagagaaggaattcataattctattagataagtttaacaaagagattgaaataatttaaaagaatcaagcagaaattctggagccaaaaaatgtaattggcatgccgaagaatgcattagagtcttttaatagcagaattgataaaccagaagaaagaattaatgagcttgaagacaggctatttcaaaatacatagaggagacaaaggaaagaataaaaaacaacgacgcctgcctacaggatctagaaaatagcctcaaaaggacaaatctaagtggtattggccttaaagaggaggtggggagtgtagaaagtttattcaaagggatggtaacagaacatcccaaacctacagaaagatatcaatatccaagtacaagaaagttataaaacaccaagcagatgtaactcaaagaagactacctcaaggcatttaataatcacagtcccaaagatcaaggataaaaaaaggatcttaaaagcagcaagagaaaagaaaccaataatatacgatggcgctacaatatatctggcagcagactctttagtagaaacgtttcaggccaggagagagtggcatgacatattgaaagtgctgaaggaaaaaaacatttaccctagaacagtgtatccagtgaaagtatccttcaaagtgaaggggaaataaagacttttccacacaaaagctgagggattttgtcaacaccagacctgtcctagaagaaatgctaaagggagtatttcaatcagaaagataaggacattaatgagcaataagtaacaacctgaaggtataaaactcactggtaatagtaggtatacagaaaaatgcagaatgtcataacactgtaactatgatgtataaactactcttactctaagtagagagactaaactatgagccaatgaaaaatattaactacaacttttcaagacatagatggtataataagatataaatagaaataacaaaaagttaaaaaatagggagactaagttgtagagtttttattagttttctttttacttgtttatgaaaacttattataagattaaaataatggattataagatagtatttacaagcctcatggtaacctcaaaccaaaaaatataacaatggatacacgaaaaataaaaaacaagaaactaaatcatatcaccagagaaaattaccttcactaatgaaagacaggaaggaaagaaggaagagaagaccccaaaacaaccagaaaacagataacaaaatggcaggagtaagtccttacttatcagtaataacattgaatgtcagtagactaaacttttcaatcaaaagatagagtggatgaatggatgaaagaacaagacccatccaggtgtggtggctcacgcctgtaatcccagcagtttgggaggccaaggcaggcagatcatgaggtcaagagctacagaccatcctggcaaacatggtgaaaccctgtctttactaaaaatgcaaaaattagcagggtgtggtggtgcgcacccgtagtcccagctactcaggaggctgaggcaggagaatcacttgaacccgggaggcagaggttgcagtgagccgagatggtgccactgcactccagtctggtgacagagcaagactccagctcaaaaataaataaaataaaaaaacccattgctctgttgcctacaggaaacactcttctcccataaagacacatgtaggctggaagtggtggctcactcccataatcccagcactttgggaggcagaggcgggtggtttactggaggtcaggagttcgagaccagcctggccaatatggtgaaaccctgtctctactaaaaatacaaaaattagctgggtgtggtgccgggcacctgtaatttcagctactcatgaggccgaggccggagaatcacttgaacctgggaggcagaggttgcagtgagctgagatcacaccactgcactctagcctgggtgacagagtgagattcagtctcaaaaagaataaaaataaaaacaaacccaaaaaccaaaaccaaaaccaaaaacatgctaatatatctgataaatattgatgcaaaaatcctcaacaagatactagaaaactgaattcaacaatatatgggaaagatcactcatcatgacaagtgggatgtgtctctgggatgcaaggatggttcaacatttgtaaatcaatcaatgcgatacattatatccacacagtaaaggataaaaaccataagatcatttcagttgatgctgaaaaagcatttgataaaattcaacatcccttcatggtaaacaccctaaaaaaactgggtatagaagtaacatacctcaacttaataaaaaccatatatgacagacccacagtcattaccgtactgaatggggaaaaaatgaaaagcttttctctgcgatctagaacacaatgaggatgcccacttttaccaccgttgttcaacatagtaccggaagtcctagctagagccattatggaagagaaagaaagggaataaaaaaagaaatccaaattgggatggaagaagtaaaattatccctgtgtttgcagatgatacattttatttggaaaatactaaagactccaccaaaaaaaactattagaattgataaattcagtaaagttgcaggatacaaaatcaatatacaaaaatcagtagcatttctatatgtcaacagtgaaccatttggaaaggacatttaaaaagtggtcctatatacaatagccacaaataagattaaatacctagaaattaacctaaccaaagaagtgtaagatctttataatgaaaatgataaaacactgatgaaagaaattgaagaggacaccaaaaaatggaaggagattccatgttcatggattggaagaatcaatattgttaaaatgtccatactctccaaagcaatttacagattcaatgcactccctgtcaaaatatgaatgacattcttcacagaaatagaagaaacaatcttaaaatttatatggagccacaaaagacccagaatagccaaagctattctaagcaaaaagaacaaagctggaggaatcacattacctgacttcaaattatactacagaactatataaccaaaacaccatggcactggcataaaaacagacacacagaccactggaatagaatagagaacccagaaacaaatccacacacacttacagtgaactcatttttcataaatgtgccaagaacgtacattgaacaaaagacatctcttcaacaaatggttctgggaaaactggatatacacatacagaagaatgcacctagacccctacctctcaccatatacaaaaatcaaatcaacatgaattaaagacttaaatctaagacctcaatgaaacaactatactacaagagaacattgggaagaatctccaggacattggtctgagcaaaaattacttgggctatacctgacaagcacaggctaccaaagcaaaaatgggcaaatgggatcacatcaagttaaaaaactgcttcatagcagaggaaacgattagcaaagtgaagagacagtccacagaatgggagaaaatatttgcaaactacccatctgaaaagggattaataaccagaatatgtaaggagctcaaacaactctctaggaaaaaatctaataatctaatcttttaaatgataagatttgaataggcatttctcaaaatatacagatggtaaacaggcatatcaagagatgcttgacatgattgatcattagagaaattctcagtgtagaaaactaccatgagatatcatctcaccccagctaaaatggtttatatccaaaagtcaggcaataacaaatcctgacaaagatgtgaagataagagaaccctcatacactgttcatggaaatgtaaattagtagaaccaattggagaacagtttggaggttactcaaaaaactaaaaatagaactaccatatgatccagcaatcccactgctgggtagatacccacaaaaaaggaaatcactatatagaagagatatctgcattccctttttgttgcagcactgttcataatggctaagatttggaagcaacctaagtgcccatcaagagatgaatgggtaaagaaaatatagtacatatacacaagagagtattatttagccataaaaaaacaataagaacccggccaagtgcactggctcatgcctgtaatcacagcactttgggaggctgaggtgggcagatcacctgaagtcgggagttcgagaccagcctgaccaacatggagaaaccccatctctactaaaaatacaaaaattagctgggtgtggtgccgggcacctgtaatcccagctactcgtgaggctgaggcaggagaatcgcttgaacccaggaggtggaggttgcagtgagccgagatcacgccattgcactccagcctgggcaacaagagtgaaactccatctcaaaaaaaaaaaaaaaaaatactgtcatttggaacaacatggatggaactggagatcactatgtttgttaagtgaaataagccaggcacagaaggataaacatcacatgttctcacttactatggggctctaaaaaaaaaaaaaaaaaattgaactcatagacctagagagtagatggatggtcatcagaggctaggaatggtagtaggggcttgggggtggggagatggggatggttaatgggtacaaaaaaatagaatgagtaacgcctactatttgatagcacaacagattgaccatagtcaacaataacttgattgtatatttttaaatgactgaaagagtgtaattggattgtttgtaacatgaatgataaatgcttgaggggatagataccccattgtccacaatgagggtgattattacgcatttagttatatctcttattatgtttgaattgccatgttggtgttttagtcacatataagtgtcaaatgatgaatataattttattgtttgaaaacttcccatgaatgttatatttttcccttagtctactctagaaaatacattttaaataattcatgatagtagaattcttaatggggatgagtcaatagtttgtggtctttaaatattcctatctcttcttgcaggggggaatgaacttattttttttgttttatattacaggagacagcagtatttttctgacttatttaacattttagatactgccattattgtgattcttctgctggttgatgtcgtttacattttttttgacattaagttgcttaggaatattcccaggtatgaaacataagacttacctctcttaaagtttttcattaattttagcattttctgtgccttttattctatataatcttttcaacttcaaatgttctcattctataccaaatacattgctttaaaatgaaatgtttaggtaaattcccacatactttgaaactaaaagattgtgatatttagggaccggtgaagagtatacaggctaagtaccattaatggaataaagaagatgcagtaccccaaagaaggacttttactcttgtactaactttaacttctctacattttgaagttctcgtcaaattcccatttgtatcattttttggccttttggctaagatcaagtataatattcttatcagtttaatatctgctatatcaaaaaaatttatattgaaaacaattcccctctgtgcttcaactacaaatcccttacacataatgttctgtctggatttttcctacagccaagagggaatttatttgagcatatgcaaaattagagtgacttcaatcatgagtttctaaaaaatagcaaacagaacagaaactaggagatgacacgtggcaacacaatagtagagttttgcagtatagttgtggtagaaacaaagaaagcaggcaaagttagaagtgggattgggaaactaaagagtatatgaagccctggtgactctttttttactgtgacaaggaggaaaatgaaagagcaaatgtatactgggatgtagatggtggcttcctaagcttgttcatgggtcaaatagctgatttctttttgtaccctagcttccctggactacagctcaggccccaactaaaagcatgttaagtgataggcttttggagttatttgaaaataacctcagccaatgtggtcctctgactagaaacgtcagcatcacttgacagcttgctagaaatataagaagaaaaataccttaggccccaccctggacccactgaatcagtatctctgggacccagcaatctgcagcttaacaagcttttccaggtggctcttattgatgtgtgcccaaatcagagaagcactagtccagaccatcagttctctgcttcagtggttctgatggtaggggagattccagctagcacacttcggaagtatctcaatctgttgcctccctgatgtgtagtagcagctgtagtgaacatctgttactcatgggaataacaaagatgaacaagaataatcgatttgttttgatgtggaaaaaattgaaaatgctagtcttaaatcccaaaattaaatttacagatgctaagagtctattgtatcactatttctctagaccagaatttctcagcctcagcattactgacattttgggccagatgattgtcataagagggtggtgagcagttatattaattgtagggtgtttagcaaaattcctggcctctattcactagatgtaagtaacacacagacacacacacacatgcacgcacgccagtggtgaaaacctaaatgcctccagacattgccaaatatcccccaggtaggtaattggggagaggagggaaaattgcctctggttaacaactgctgctctagacatagtttatattgataaaattttgtttctgaagcaaaaatggatcgtttaaatttattcttagatggacacatttacttcgacttctacgacttattattctgttaagaatttttcatctgtttcatcaaaaaagacaacttgaaaagctgataagaaggcgggtaagtgggcaaaacatgcttatgattcacaaaaatattttgtgttttgggacccattgacaagggttgatatctatactgtataatgttttttatttttatgttgatgagtgtttcacaaactaatgacgattttaaactgtcaggtttcagaaaacaaaaggcgatacacaagggatggatttgacctagacctcacttacgttacaggtttgtgacacttaaccgttgatttacttgtattacttcactttttcttgtaattgtatttttttttgcctcatctaagacacattcattcaaaatattctttattcatgaggatatatgctactgtgatagtgtgacatatttgtggtttagccctggcaatggaagatctacatgtcttctcaattcaagactactcagttgcagcataggaacttgaatggattttcagctgactccatttgagtttcaatttattaacctctagtagttatttctgagtcccagggatcccatggagacctcttcttatcctagaatcccagagaatgaggtcagtgctttgtagatctcaggttttctgagtcagagggctgcaaagcaccttgggagttcccaccatcactggtgcccagaaatcttggattttctctggtatttaagataagaaataaattctaagaacagggggaacttcagactgaggccatcataaatacatggcatacagttagaactagtggagacttaagaactccatggcagtttaatggtcattgtgttggataatttaatatgttatttgattatcctgagtattagctcttttctgtcaacctcaatcttaaaaggttttttttctgtgaaaatggaatctgatcatgtataaattaatttttttgtatgttgtatgaaatctataataatgtttgtaatagtgatgattttgacttttagaacgtattattgctatgtcatttccatcttctggaaggcagtctttctatagaaatccaatcaaggtaagggtctttatctgacaaatactcatttcttagtgaatgtagactgtgtagtcataagtttaatactgacccagatatggcagtattcttttaaaaatgtactctttcaaggaaaaaaaatcataatggattgataccagttacagttgtgccagtggttacaaaccaccccaaaacttactggcttataacagcaactatttatttggctcatgatactgtggtatgtgaatttggtatgggcttaactgtccaatttaggtgcttgcagaaaggatttcctgtctcaactaagctcattcatgtatctgtgggcagctactgggtcatctgaggactggtttagtctaaaatgacttggctaccctcgactgaaagagccactgcatgctaaatgcaccccccaaggcccaaggcccatcccatctggcacccactgctgccaacagccccacccccttcaccagcagagccaccatttgcctcatgcacttctaaggcactgaggactggcctgcctggtgcccgccctgctgttggcaataccccataactagcaaagccactgcagctagcatgcatatgcctaaggcctgagaactaatctgaatgatggctctcacaacaagaaaagccataccactgtctccacaaacactcaccatcaggccactgaggcactcacagacaccactgaatgctgattacagccaaaaaagtcacctgaagactatattactgcacccacccagaaccaaagtcaaagcaccctactcaatgaacactataggagacaactattggaaaaagtatttctctgtgaaagctccctaacattggaagaggcaactgttctcccagatgtgcaaaaatcagtttagggccataagaaacgtgaaaagcaaggaaacattacacctccaaagaaacaccataattccccattaacagaccctaaatttaaagagtatatcaaatggctaagaaggaattcaaaataatgatcttaaggaaactatgagatacagagaattcagatagacaaatcaatgaaattagaaaaacaatttatgatcttatgagaaattcaacaaggatatatatatcattaaaaaccagacagagattgtggagctgaagaatttaaggaataaaataaaaatacaatcaagagtccaggtgaagtggttcacacctgttatcccagcactttgagaggccaaggcagtggattacttgaggccaggagttcaagacaagcctgattaacacggcgaaatcctgtctctaaaaaatacaaaaattagttgggtttggtggtgcatgcctgccatccaagctacttgggaggctgagacatgagaattgcttgaatccaggaggtggaggttgcagtgagccaagattgtgccactgcactccagcctgggtggcagagtgataccctgtctcaaaaaaaaaaaaaaaatacaatcaagagctttaaaaacagacatgggagagatatggccaaaatctaggaagctcaaaggttctcaaatagattcaacccaaaaaaggtcttctctgaggtgcatagtagtcaaactgtcaaaagtcaaaaagagggaatattcatcaggtgcggtgtctcacacctgtaatcccagcactttgggaggctgaggcgggtggatcacttgaggccaggagttcaaggcgagcatggccaacatgaagaaaccgcatttctactaataatacaaaaaaattacctgggtgtggtggcgtgaacctgtagttccagttacttgggaggctgaatcacgagaattgcttaaacccaggaggtggaggttgcagtgggccaagatcataccactgcactactgcctgggtgacagagcgagactgtatccaaaaaaaaaaaaaaaaaaaaaaggaaatgttaaaaacagcaagaaaaaagcatcaagtcacatataagggaaactccatttgattagcagtagatttcccagtggaaactttacaggtcagtagacaataagatgggatgatatattcaaagtaccgaaggaaaaaaaaaacaactgtcaaccaagaatacgatacctagtagagctatcccctagaaatgagggagaaataaagtatttcctagacaagcacaaactgaaggaattcattcccactagactgaccttacaaggactgctttaggtggttctacatctggaagcaagaggatgattaccattgtcaaaaacacaaacgtgtaaaactcacctgtagtgcagatatacacatgagaaagagaaaggaatcaaactttgtcactacagaaagtgaccaaaccacaaagattaaaaaaaaaaggtgaagaaaagaacaaaggatatacaaaacaaccagaaaaaaatgaacaaaatgacaggataaagcctcatctattaatagtaaccttgaatgtaatgtaaacagatcaaattcccaattaaaagatatagagttggctgccaagatttaaaaaaaaaaaaaagacccaactgtatgctgcctacaagaaactaacttcacctgtaaaggatcatacagactggaagtgaagggatagaagaaaatattccaggcaaacagaaaacaaaagcgagcagaggtagccatacttatcagataaaaacagactttaagtcaaactgtatgaagagacaaagaaggtcattttataataataaagagatcaacttagcaataagatataataattgtaaatatgtatgtaccctacactagagcactcagataaacaaggcaaatatttttaggtctaaagggaaagatagactccaatgcagtaacagttggggcctttagcaccccactcttaaccactggacagatcatctagacagaaaatcaacaaagaaatatcagatttaagcttacagataggaataagttctggtgttctgtagtgctgtagggtgactacagttaacaataatttattgtatatttttaaatagagaggatgttgagtgcccccaacacaaagaatgataaatatttgaggtgatagatatgctgattatcctgatttgatcattacacattgtatacaagtattgagatatccctctctaccttataaatatgaacaagtattatgtgtcaattaaaaatatttttaaagaatgaaggaaacagattttttaaatgaaaggaaagaaaattacctgacttggctgaatggccccatgtggtctctcattctccagtaggctacttcaggcctgttcacatgatggcagaggcaagagtccgaggagcggcaacaaaacaatgcaaatcctcttcaggcccaggctcaaaattatatattaattctaccccattttattggacaatgcaaattacactaccagtctggattcaaggagtagaaaataaactccaactcttgatggaaggaattataaagaattgtggccgtttttgatagtctaccatagggaagaaagatggggatgccataacccaaaatgtgttttcttaggttgagatcctaaattatagtcggggcatattgctttaggctctgtggatgactaaattaatttcaaacatataatgctgtttactgtgaaatgccagctgaaaggatcattgtttaattttatgtaatttacaatacttattatacctcaataaaaatataactatcgagggctggtatcagttgccgagaggtggaaggagtacctctctgcagtgtgttagctcagttctgaacaggacagggctgcaagttcagctacttcccagaaaatgtcctggatacctggcctgagtcatcatcccatgactagagaacgtggacggattattttatcaagaaactagtgataaaccaagggctataggaattaagaactagggctaaaaaagaaatgtttagagtgatgcaagatggccaattagaagcagctgcagtctgccgcgctcacaaagaggaatgaaaaggggcgagggaattcagcaccttcaactgagataaccaggttctcacattgggactgactggatgaacaggtcgaccaatggagaatgaagataagcaggcagagggtgcgatggcccagccgggggcggcatggagccaaaggaacccccactcccagccaagggaagcagtgagtgagtgtgcagtcctgcccgggaaaccgtgtttctctcatggatctttgcaagccgtggatcaagagatccccttgtgagcccatgccaccagggctgtggatctgatacacagacctgtatggagtctgggcacatcagctgctcaggcacacacagaaacccaggagttttacacactctagccccggggatcttcagcacagtgggaaatctgtccatacgtatctctgggaagggggctgaatccagggagccaggcagcatcattctgcaggccccgtttccttggcacctcacaagttaagacccactggcttggaatcctagcctgccaacagcagcaggttggaatccacctcagatgggtctgagttcccggggaggtggcgagaggcagccagcatcactgtggttcatagactcagccactccagcctgccagctatggagaatacagacagtctggacaaggaagagttccccacgacacagcacagctggcttgccagatcatgaccagactgcctctttaagcaggaccccaatcaattcctcctcactgggcaggaatccctgtaggggctttaaccactccagcagcggttctatggacagagctttgatctctccctgaaatggagctcctggtgggaggggcagctgccacctctgcagtttggtcaactcagccattccaacctgctggctttggagaatacaggtggtctggaggaggaaggatcccccacagtgcagcacacctgctctaccccaaagcagccagactgcttttttggatgggtccctgatcccatgcctcctgactgggtgagaatgcccaacaggggtctccagccacctcttgcaggtatgtgcgggctggatacaggtcagtatccccctgggatggagcttccaaaggaaggagctggctgccatctttgctgtttctcagccttcactggtaatatctccttcagagtctatgaggaacttaaatttacaagaaaaacacaaccccattaaaaagtgggcagaggatctgaacagacacttcccaaaagagacatgcatgcagtcaacaaaaatatgaaaaaaaaaaactcaacatcactgatcattaaagaaatgcaaacaaaaccacaatgagataccatctcatgccagtcagaatggctactattaaaaagccaaaaaataacatgctgggaaggttgcagagacaaagaaatgctgttggtgggtgtgtaaattagttcaacccatgtggaagacagtgtggcaattcctcaaagacctagaggcagaaataccatcagacccagcaatcccattatggggtatatacccaaaggaatataaatcattgtcttataaaaatacatgcatgcacacatatgttcattgcagcagtattcacaagagcaaagacatggaatcaacctaaatgccagtcgatgatagattagataaagaaaatatggtacatagagcgggacatctggcttctgagcgggaacctttgtagtgccagtgatgaaagagagaattaaatatgggtgatgctgagaaaggcaagaaaatttttgttcagaagtgtgcccagtgccacaccgcggaaaagggaagcaagcacaagactgagcctagtctccatggtctcttcaggtggaagacaggtcaggccattggattatcttaacatagagattgataagaacaaagccatcacctggggggaggatacacctgaagtatataaaactatttatccttgcctcccccactatgcagattcagagtgttcatctttttgacttattatttcctcttaacagagatagccagtttaataaatggatgactttgataccttcattttatttttctcaatattaagccagtaaacattgctctgagggtaccatactaatcagttttaaaattttgtgtcatttttgttgttgcacagagatatatacgtatgtgtgtgtatgtttcagaaagatgtatttactgaaagttggattcatatagtggtattgattgtattttaaattataactactatttgtttttcattttaaaggttatacatatatacatatatatatatatatatatatatatatatatatatatagacacacactttataggtacacatatatcttcatttaaaaaaataaagagaacaaatgagccaaaaaagtctccatattgttaccagttatttaaaatttgatatgtttatctttttctatcacacatacacacaatcatactatatgctttttgcatttgtttacatagtgcttagatagactgtaatatgcagatcactctctaaagatgtatctattcagaattaaataagaacgaatatgaattagatttaaacaagatccatattaactgtgaattaatgatttagaacaaattacttaaagttagttaaccagctaatttacttatctgatagctttaaacagtgtgcatttacaatagagactcatctgagtagccaaacatacttgtggactatttgaaaaatcacagtggattagaacttgaagtttgcataccctcttattccctgaatctccactagaagatgctagtgagagacaaattaataaaagtaataaccattttaggttccccctaggaaatagcttatgttggtgccatgtaaatatgtaagatatgtgtttgtcttttttaggaagttgtgcggtttctagataagaaacaccgaaaccactatcgagtctacaatctatgcagtatgtacattactctatattgtgctactgtagatagaaaacagattactgcacgtaagaagatgattttgttttttagattgcatttaatcataagtatttggtagtggcaaggaatgaatttaaaaatccccatcttggactggccccatttagtagaaggagttagcccagcagcacaaagtaccgtatgaaggatgtggctttggcaggaccaatgaagctggagtggaagaaaaccattttagggaagatctgttctagcgatattaggtttaggaaaatctttctgtttttcttgccagattgtgttatgaggacatagacaatttaacaaatgagtcttctgacccatcagcagtggcatgtgatgagagcaaggctctagatgggaaaaaagcaaaaaactgtagaaaataggttgtaacccagtttaataccctgtctctcttgattttttcctctacctgtatactcaatagacattttcagggggcaaacattttggtcagctacatttgccttgtgtggtttctaactaccctgaaataatataatgaatagtctgctagaaagttaaaaattatacctattaaacaaaaataagttgagtttaggttatatgagatggataaaccactaccatccttatatttttgaaacgcttgcgtttattttagagtggcaggagcaacttggaaagctctttttgaagatagataaggaattctaataagatatgttaacttattcataacttcctcatttatcatgttattccctatagagatatgacatacatattatttattttaggtgaaagagcttacgatcctaagcacttccataatagggtcgttagaatcatgattgatgatcataatgtccccactctacagtaagttttatgctaaattgactatcagaagagggctaaatatattgggcttgattttttgaaaatattttaactaaaaatcttaaacttgaaatcagtcagatggtggttttcaccaaggaagtaaatgagtggatggctcaagatcttgaaaacatcgtagcgattcactgtaaaggaggcacaggtaataacattttcctttttatttctccatttctaaagacatgtaaatatacataaagtacaagaacaagatacgtattgctattaatatgtattaataattgttagcatttttaaatattagctccaagactgaaagaagggaaggagaaaggaaagaggagaggaggaagggtaggagatagggagaggataaggaagggaagaaagtaagaaaaaagaactaaggaaggttgagcatattttcccttgttttcctagtatttggatttctttatttttggtttgctagtttatatctctcaaaatacaaacagtctttaattttagaatatcagagtactgttatttaaggctgatcttttttatttttaaattaacaaataaaaaaccaatatatttatggtgtacaacatgatgttttgatataggtaaacattgtgaaatggctaaatcaagctaattagcatatgcattactccacatatttttgtgtgagaacatttaaaatctactgtctcagcaattttcaagtatacattattattaactgtggtcactatgttgtacaataaatttcctgaacttattcttcctgtctaactgaaattttgcatcctttaattaacatctcaggctgggcacagtggctcacacctgtaatcccagcactttgggaggttgaggcaggtggatcacatggtgaagccccatctctactaaaaattacaaaacattagccaggtgtggtggcatgcacctgtaatcccagctactcggaaggctgaggcagaagaatcgcttgaacctgggaggcagaggttgcggtgagctgagatcgcaccattgcactccagcccaagcaacaagaacaaaactccatctaaaaaaataacaataatcataaagtaaaaaccaacatcttcacaatcccccaagttttgtctccccagcccctggtaaccaccattctactctctgcttctatgaatttgacttttttagattccacaaataagcaagacatgcagtatttgtctttctacgcctggcttatttcacttaacataatgttctccaggttcgtccatattatctcgagtgacaggatctcctctaaggctgaatagtatgcctttaattatatataccatatattatttatccattcatccactgatgacatttagattgactccatagcttgggtattatgaataatgctgcagtgaacatgggagtgcagatttcatttcctttggatatatacccagaagtggaatctccaaatcatatggtagttctatttttggttttttgagaaatctcagtgctgttttccacaataactactaatttacattcacaccaacagcgtacaagggggttcccttttctcttcatcctcaccaactcttcttttgtctttttgttaatgaccatcctaacaggtgtgaggatatctctttgtggttttaatttgcttttccctgatgattaatgatgtttagcattttctcattatacctcttggccatttgtgtgtcttctgttgagaaatatcttttcaggttctttgcccattttctagagaagtaacttgttctcttgctattgtgttgtctgaattccttttttaaaaaatctgttaacctattatcgaatgtatgctttgtagatatttctcccattctgtaggttgtctctttactctataaatatctcctttgctgtgcaaaagcgttttagtttgatacagtatcatttgtctactttttctttcgttgcctatgcttttcagtcatatccaaaaatatcttggcccagaccaatgtcaagaagattttcacctatcttttcttctagtagttttccaatttcatgtttcacagttaagcatttactttgagttgatttttgtatattgggtgagataggttgcaatttcatttttctgcaagtggatattcagtttccccagtatcgtttattgaagagactgtcctttcctcatcttggattcttggcacctttgttgaatatcagctgagtataaatgcatggattttttctgggctttgtattctgttccattggtctatatgtctgtttttgttccagtaatatttaaggttgttcttaaactttgtgagaaccttttagattaagggagccaacagagatgctatatcaaaaattatactggaatttttatagtgtaatgatacgaagaagttgacattggtggggtgaaaatgggggaaaaaagccatttgtaaatccaaccaatttaagtttagttagattttctctcattcaggtttgggctttaaataatcatctaagcatatttcacaaattttgacaaacataaataattacatttttagtgggctctaaatcaatttttatatcaaattccaggaaaacatagcaccatcaactgacttatataattcagtaaaatcaagtttttgtcttattgactagtttcaagcccattagttaaaatacaggttctgtgtttagctgtatattagttaatatacaggttctgtgtttagctctacaggttggaatattgtatatatactggaaatttacagtaccatacttaagaatatagaggttgaatcatttgaaattgccagtttttaaccatcttttgctttaaaaatggccatttcacattgtccaacctaaaatgttattattaaagaagttagcatcagttttctattaactaatgctaattccttgcttgaaggaaaacaatcatttcaaatctgactttttttcttttgtgctgagagagggtttacattattctgtgttcacataatattttgttgattttgttaaaggttgtttagagggctaatattcagctggtatgtacgagagcagcctcttttttatgtgttcattcatattagtcttgctgtcttctggttggttgctgcttgcaggttaccagtagtatcgtgatagtaaaaatattttatattgatttatagaagttctttaaagaatctggatgccaatttttcttagtattgtaattatattctccccacatgttgccttttaaatttgatcgtgatttattttgttgtacaaaagtttgtaaatttttgttttgttttgagacatgatctcgctgtgtcactcaggctggagtgcagtggcacaatctcggctcattgcagcctgaacctcccggggttcaagcgatcctcccatctcagcccctctgagtaagtgggactacaggtgagcgtcaccatgcctggctaatttttgtattttttatagagacagggtctcactgtgttgtccaaactggtctcgaacccctggactcaagtgatccacccacctcagcttcccaaagtgctgggattacaggcatgagccatcatgcctggagagaagtttgtaattttgaatatagtgaaatttgtttttctatgtgtgtgtatatatttcacgcttttctgtcatgtttatgaaattcacccccctatactgatgtagtaaagatattccacatttcttcaaaaatattcaagttccattttcaatatttgggtctttaatctaattggaagttgggggaagtgtttttttcatatagatagccaattgtcctaacaccatcaattgcgtgctgttttgttctccattaatttgtaatccctctcagtaatataccaagtttctataaattttcaaaactgttcctaagttctctctaccacacttttgtaattattgtagctttataatgtggtttgataaaggcataattgtcttgctcttcttggaactttattattacattcaattttaaaatcattttgtgaagtgccataataaaacacttttaggatttttattggaactacattgaatttatagattaacttgagagaagtgacaactttgcgatattgagttgtacatgtgactcatcttgttcattctttaataatattttatacttttttatcatgtctttgcacatcttttcaaatattcattcctgcacaaattgtgactgaaaatggaatctctttttttctattacatttgggttgtttccaatttttattgtgatgaattatgttttttgtttttttgttttgagattaggtctcactctgtcacccaggctggagtgcagtgacatgatctcagttcattgcaacctccgcctcctgggttcaagcaattctcatgcctgtgcctccagagtagctgggattacaggcatccaccaccacacccagctaattttgtatttttagtagagatggggttttgccatgttgtccaggctggtctcaaattcctgacctcaagtgatgtgcctgcctctgcctcccaaattgctgggattacaggcatgagccaccgtgcctagcccaataatactgcttttaaaaatacacgtttcttgttgcacatgtggccacatttttgttgaatgtatacctcagaataaaattgttctgtcttagggtaatgaatcttgaactttacttgataatgtcacctgttttctaaaacagttgtaacaatttttactccactggtattgtagacttcaagcattccatatcttccccaatacttgcaattctgagtatttttatctttagcctttgggtgtttgtgtgatggcatcttatggtggtgatcatttgcatttctgtaattaataagattgaggaagttttttttaagattattaagtatgtggatatccttttttgtaaagtaactttttaattttcttaaccatttttctcctggattattcatctttttttctcccgattgtagttctttgtgtattctgatttcaattctgttattggtcataaatgtatttcaagaaagcttttctgctctgtgatttgccttttctgtctctcaggagtagcttttggttaacagaagttcttagttgtattaccgtcatatgtatcatgctttccctttataaagtttgtgtttttgtgtcctgattaagaaaattttccttgagtttaaaggacattttactactgtattttcttcgagaaggttcattccttttaaaattgatctatgtgtgtggtgtgaggaaggcgtcaggtttcatcttttttcatgtatggctatccagttattccagcacactggttcagaagattttcatttctttactaccctgaggaacatgaatctgtttctgacatttctcttctgttcattgatttttcatctgtgtgccaatagcacaactatcttactgtagctttctaatatgtcctcatcatcttcttctttttcttcacaattgtttgggtattttaggtcatctatatttccatataaatttgggaatcaactagtcaaattacaaacactgggtagaaatttgtttggaattgcattgaatttatagactggggagaattgaatctttacaatattgactcatccaacccatgaacagaggtattctctcatttagttaggtcctcttcaatttctctttataatgctttctcattttctgtatagaaagcgtgcatatttttggtgagatttattcttagattttttttgtggttatttaaatgatatccctttaaaatgtttattttctaaatgttttttgttgttttaaatgcagttcattttatttattaatcttgcagttagcaactttcctaaactcactttttttttttttttttttgaggcagtctcattctgtcacccaggctggaatgcagtggcatgatcatggctcactacagcctcaacctccctgggctcaggtgatcctcctatatcagcctcttgagtagctagcactgcaggcaggtgccaccatgcctagctaattttttcatttttttgtagagatggggtttcgctatgttgcccaggttggtctcaaacttctgtgctcaagtgatccgccagcctcagcctccacctcccaaagtgctaggactgcaggtctgagccaccgtgcccagcctaaactcacttattagttctactaatttatctatagattcttttggattttatggtacacgattacatcatatgaaaataataaattatattttttccatttcagtcattcatctcccctagcactggctagaacattcagtacagtgtagaattagaagtggccatagcagccatcaacatacagttccattatcaaaggaaaagctttcaacatctctccaaatgctttacgagtgtgtgtgtgtgtgtgtgtgtgtgtgtgtgtgtgtattagtgaccatttatcgattaagaaattccttggctgggcgccttggcttacacctgtaatcccagcactttgggaggcccagtgggggcagatcacttgaggccaggagtttaagaccagcctaggcaacatggtgaaaccctgtctctactaaaaaatacaaaaatttgcgaggtgcggtggcacatgcctgtaatgccagctactccggctgaggcacgagaatcacttgaaaccaggaggcagaggttccagtgagccaagatcgcaccactgctctccaacctggatgacagagtaagactctgtctcaaaaaatgaaacaaaaaaaaaaaaaaagaaagaaagaaaaaagaaattcgtttagcttgctaagagtttttttttttaaatcatgaatggatgttgaattcttaaagatttttctgaatctttgagatgataatttttctactttatcctataaataaatgtggttaattgcattgattaagtggtaaaccaacatgtttctggaataaatgtaatttagttgtgctgtattattttgttaaatacttattaaattattttattattaaattgccggattctgtccgttaatattttgtttaggattttcaaattcatgtcttctgggcaattggttataattttcctttctcatagttttttcaaatcttggcttcgtaaaatgagttaaatttcattttctctgtttttattctctgggtaaatttatgcatgctgatttttttccttcttaagtgtaaagtgaaattcaccagtgaacgcacattggcctagagttttctctggagagaagtctttaaattatggctcaattccctatatagaatgtttttataattttatttcttttgcccattttggtagattatagttttcccagcatttgtccatttaatctaactttgcaaattgtcttgacatcaaattgttcacaatatcattttaccattttagtgtctgcagagatgttcccttttttattcctgacattgctttcttggtgccttctccccttttttcttctgagtagtcttaccacggatttatcaattttactagtcttttaaaagaaccaagtttttggcctatttgtggtctctattttttacttattttttatttcatcaattactattatatttagtactttcttctgtactccttgggttaatttgttcttttcctgacttcttgacatggataattcttagagtgtcaaccactatcttttctatttaccatttaaggctacaagttttcctctaagaattgctttagtttcgtcccataaatttttatttttagtgtttttattttactcagttcaaactatgttccaactttgtgcttgtttttttttttgacccatgagttatgtagaaatatacttccttatttccaaacatatgagaattttgtatttatctttaaatttttgatttctgattatattgtgtggtggacacagaacatactatgtatttttttcttttttagttctttgaaatttgtttagacttgcttaatggcccagaatttggtcgatattgtcaaatgttttctgtacatttgaaaagaacatgtattatgcattgttgagaacagtgttctatgtacatctatttaactcttctgttttcctactgacattctgttttcatttgattgaattttaataatataattctttccttctcaccgtctgtcattaccttggaagtcatatactgtttttctatgtttttagtaattactgtaaagatttcaacctgcatccttgatttagctattaatttttgtttatgttgagcctgcatctagaaatcttcctaaaatctctcattagattaaggagttattctaaagatttacttactacactgactttctacactggttaggctctgtagtatactgttaaatggaagcagtgaagagagggcatttttgtttaattccaggctttaaagaaaatgctttcaatattatatcattaatatgatgttcctggtaggtattttggtagattctctttgttgagttaaggaagtttcctagttgttaatttttaaagtcacaggtgcaggctgaattttagtgaatgctttttcctgcattaattgagataattgtaaggtgtgtcttctttaatcaatgaatatgataaattgcattaatatagatttctgatgtaggatgattcttgcatttgttattatttgttttttaataggcaaaagactttctttttctttttgagcttagatttttggtataaattagcttttagatttggaagtgcatatacaggtttattggtaatattgtgtgatgctgaggtttggggtatgattgatcgcatcacccaggtactgagcacaagacccaatagttagtttttcaacctgtgtccttttctgctgtgccccttctagaactccccagggtccattattgccaccttgatgtccatgagcacccattgtttagctttcacttatgagtgagaacatatggtatttggttttttgttcctgcattaatttgctcaggataatgacttccagctgcatccatgatgctgcaaaggaaatgatttcttttttttttttttttgagagggagtttcgctcttgttgcccatgctggagtgcaatggcgcagtcttggctcactgcaacctccacctcccaggttcaagtgattctcctggctcagcctcccaagtagctgggattacaagcgcctgccaccacacccagctaatttttgtatttttagtagagatagggtttcaccaagttggccaggctgctctcgaactcctgacctcaggtgatccacccacctcagcctcccaaagtgctgggattataggcatgagccaccgcgcccagcctattttttgtttgtttttgagatggagtcttgctctgtcacccaggctggaatgcagtggtgcaatctcggtcactgcaacctccgcctcctgggttcaagcgattctcctgcctcagccttctgagtcactgggattacaggtgtgcaccaccatgcccggctaatttttgtatttttagtaaagacagagtttcactatgttggccaggctggtcttgaactcctgacctcaagtgatctgcctgccttggcctcccaaagtgctgggattacagatgtgagccactgcacctggcccatggctctattttgaagtatgttcttttgattcctagtttcttgagtgtttttttttttttatcaagaaagatgttgaattttatcaaaagcttttttttctgcatctattgagatgatcatgtggtttctgtttaattctgcaccacatttggtttgcatatgctgaaccttgtatccttggaatgaagcttacttgatcatgaactttttgatgtgctgttggatttggctgttatcctgatggggctacctttgtgtgtgatctggcctttttctccagtgcctttagggctttttctttgacagtgaccttggatagtctggtgagtatatgccttggtaatgttcattttttatagtatctcacaggtgccgtctggctttattgtacttagatgtctatctagcaagattcaagaaattttctcgaattattccatcaaatatgttttccaggctgttttctttttctctttctctctagggcatgccagtaattcataggtttggtcactttacataatctcatatttctgactttcttcacttttaaaaaatatttttttctttatttttgtctgactggattagttcaaaagaccagtcttcaagctctgaaattatgttttctactttgtccagtctgttgataaagctttcagttgtattttgaaattccttagtgagttttttttattctagaagttctgattgatttcttattaagatgtttatctcttccttcatttcccggattgatgtagaagtttctttttgttgatttcaaccttgaatctcattgagcttccttgcaacccaagctttgaattgtttattgtcatctctgagttttcattttggtaggaagcattgccagagagctattgtgatcctttggcagtgtcactacattcagatttctcatggttccagaattcttgcgtgggtccttctcatctgcacttctaatttgtgtaattatttttgtttgggtaggatttttctttttctttcctttcctataatattattgttatttttttcttctttccctttcccttctccctagagggtgtgactgtagagcatgctgggtagggtcttttggctttgcttctgcagccctatgcacttctgccagcaggttttatattgggtgtgtggtttgacctatgagccagtagatggcgccatgggtaagagctggctgttgccagtgctgctggctgtgtacttcatccttgtttattgggaggagctctctgttgccccaggcaatgggctgaaatcctgagtacacattaatctgagctccctcagccctaggggtagggggattgggggcacaagatgggtgcagccagatagggaagattcccccagtgttgtcctgctcccagtccaggtttgggaaaatgccggcagcgtttccctgtgtctttcccccacaaagtctccaagtctcttctcaaatgagctccaaggcttgggagaaacaatctcttcctctgcccgggttgcatggatgtccagtggaaaggtgagacagagggatgctgtctgcctgtctcacatactgaggcttcactcacttttatcagtcgaatgctgtcctgagggctgcttgcctgcattgtcctccccaggatctgggatgtccttcaaaattccggggaattgccattttctttcttgaattaaagctcacagagttggtctttatgtacttgcttgctatttccaaatgactgaggcaggcatgctaaaagcctgtaatctgccatcttggaaaaaacatccttgcatccttaagagaaatggcacttggtgttgatacatggtgtttctacattgctgaattcactttgaaaatatatgtatatttttaaatctacatttatatgtgagactggtgtaaaaatatcttctactgcatttgtgcaattttggaatcagttatattaacgtactaaatgagttgggaatttttcttttttactattatccaaaaaaatcataaaatacatgaattgttgctttcttatagattttagtaaaaacctcatcgtgtccttttgtggagagatggtgagagatatttttactgtaaatgtaatttgcctatttttcacctgtgagatggaggtcgcaatgagccaagattgtgccactgcactccagcctgcgtgacacagcaagaccctgtctcaaaaaaaagaaagaaaatcaagttaaaatgcactccttgaatatttctgagtgtatttttataccacgtatgttcttgaactaacttcttttcttttctagatagaacaggaactatggtttgtgccttccttattgcctctgaaatatgttcaactgcaaaggtatgaaagatgttctacaaactttgtcttaggatgattgagtttgctagttctgaaacatcactggcaggacattaagatgattattttagtcatggtgcttagtaaaattgtaattagagaagcagtctttagaaagtctgtttttgatactttcttgtttaatgtgcactagttagtagctgacttcagaatctctttgggccaggactagagtgaggtcaatgaggtgcaaaatttaagggaatgctaaaaattgtaataattaaaataaataattttaacgcaatattttaataaaaattaatgcaaaaaatcgatgatgtatacaatatcaacatgttaaataaagacaagacctgatggggcaggattaaggtgaggggagtaaagccatgttacacagaaaaaaacattcagtaatcaagatgcttccctcacttcacctggccctgctcttcctcctgccagtaccatgacttcttccttcctcgtgagaatagtatcaagcttaattagataaattctccaaagagccttgcccatcctcacaactcttaggtagataaaaagcaacatttcacaactcaaaacaaagcctctcctgaatgtaaatatctttgcttagtcaatacatgtggagtctgtgacctctaaaaatttctgataagacaaggtgggctgtttccacttaaagcagagttctcagtcatttttctttctgccgttttcttgctgagatgctaccatttccagcagctctgctcgagttgtttggcctcagtctagggaagaggtggtggttgtgcacaatgcccagactccaattccaccacctttggtttctctaatttgagatacacagattttgaaaatgggtgttctaggatggtgtttttcaagctatggatcatgatttatcagtgagttttaaaataaagttactggattgtaactgacatcgtttgaaaataaaatgaatagagcagaatagaaaatatccaaaggtttaaatattggtgtgtgtgtgtgtctcctaggtttattaatgtggattgcaacttaaaaaacaaaaggtttgaaagtcattgacagccattgatccagagccctagactgagacccagggacatgtatgcgaggcctgtgcttcttctaactggctgcagcatctccttggcaggttgcttggttttgttttggtctcagtgttgtcatttgtaatatggaaagaagggttggaccagatgctttctaaggtgtttctagctctaaaattttatgaatgtatgaatccttgaatgagagaagtcctaattttgttattttcggtagcctctgcccaaagatcactgcggccgggcacgggtggctcacgcctgtaatcccagcactttgggaggctgaggcaggcggatctcttgaggtcaagagtttgagagcagcctggccaacatggtgaaacccctatagctactaaaaatacaaaaaattagctgggcatggtggtacacacctgtagtcccagctactcagaaggctgaggcagtagaatcacttgaacccaggaggcagaggtggcagtgagcttagatcctgccactgtactccagtctgggttacagagcaagactctaccaaaaaaacaaacaaacaaacaaaatcactgactttaggaaagaaggtgggcgtagaaacactaagggtacctaatataggaaaggaaagagtgcagatgaaccatggttggattgtacccttttttgtaggaaagcctgtattattttggagaaaggcgaacagataaaacccacagcgaaaaatttcagggagtaaaaactccttctcaggtaagttttctttttaaaaatgggagtttttttaggggtgtgggttcagattgccacctgttatttggtttcattttagactcctctcctttggtgatcaggcagcagcagttgggtgccctgcaacaggccttagtccctccctgagtctgagggtcacgcttcaggtgctgcccacatgctggggactctggtttctcttcagagaatcctgctttctattctatactggttattgtttacagagctcaggagttgattattttcccaaagtaggaaggtccagtacccaaggctccaggactctgaagtgtgtctaaaatcaccagcctttgatttcaatgtaaaaaagatccaagtctttcacaaacccttactaggacaattcaacccttgcagaacatcacaaagactgtttttggatgactcctggtgtgtgtgtgtgtgtgtgtgtgtgtgtcttttctgtgtgttgtgggggaggtgtattttaaaagagaaaataaaagggaaaataaacttttcaaaaccccttctgtatcccagacagtattgcacttttacatatctcatttaatacccataacacctgtatgaaatatacactgttactctgttttttcttttagaaacattttgttatggaaaattttaatcatatacaaaagtccagagaatcatacactatatcctcatgtagtcatcacattgctgcaacagtatttcagctggcgccagtcacatttcatccattctttcccactccactcacaccccccaaccccactctccactcttgttttccctaaatctgagttattgtaaaggaaatttcagtcgtcagatcattttatcacacagcattttagtatgacatttaagtactcttaaaacaacaagaaaaaaccttaacactttttatcatatctaacaatattataccttaaaaatcctttatatcaaatttgtagtccatgtttgtttccaaaattgtcttaaaatctttgaaaatttagtttgtttaatcagaattcaaacaaagtccacacatttcatttggttgctgtgtctcctaagtctcttttaagaatctaagttcatagatttctcaccattttttattacttgtaatttgtttattgcagaaaccaggatgtttatcctatagcatttacaacattctagactttggtgaactattctgagggttctctattcactatctcatttaatattctcagtaactctgtgagtaggcactactatgattctcataaattagaaaattgaggtttagagaaagtaacctttgaaccaaggactgaaatctagatgtcagtctctgaagcccttgctgtgcacagcttgtcatttatattgccttttctatattgcccctgaaaccgaagtgagagcgggttgggaatttctaaatggatttggatgtggctgtaaatgagtttttctttaagtggtgggagctgagtagaagaactctctaactactggccctaagcctttagtttgggccagaagaactcagctttatccactgctacttttctcccacacccaagccccaaacaaaacaaaacaaaacaaaacaaagatagtcatagactctaagctaaaagtgataggtgaatttactgaagtgcagccctaatcatgccatttccatgcttaaaatccatactatgtccccactgccaatggcaataaactaaacgtttcaacctggcactcaagagccactctttgacttttccaaccttctcttccgctgtgtgcatcacacatcccatactccaacacatttagactctgtgctctttcccagcctatggacacttgataccctcatgccattgctcatgccccttttcctagagtccctttcccttctcagcctgaagtagtctcttgctttttcaattcttagagccctttgtgtttcttttagggactacgtcactttgcatcattctctagttatttgaagtggtgacttctgtatcccctttaaaggcaaagcccgtggcttacccatctttccacccttttctcataatgttttctttgtttgtagtgagtgcctcctatgtgttggttgtattaatttctactacaagtccatgttgttttaagttgtaggagaaggaagcgtgggagcacaagcagcttgagggccctggtggtttacagcccttagggaaaggtggagaatctagtggcagaagctaacgggatgctagacggagctccttcaacaactctccccacacatctccccatccccatttcttctgcagtcgtgcatagtttccctaactgtagtccagaactagcacaccaaaggctgcaactgaatctcttctgattcaccgaaaaagcaacacagggactcagctgcacgtttgagagctgtgttggcaagacctcaggacagagtgccctctgtgtctggtggtgattctcagacaccatcacattctgatcctgcattgtgggccattctactgagtgcatctactcctaagttaaggactttcatgaacctgtctcatgactggccctttctaaagggaagtatggccgttagttactttaatcaacatttcccaatgggtaaggaacagtctgtgaacttatgagttttgttttgttttgttttgtttttaatttttgagacagagtctcgctctgtcgcccagactagagtgcagtggtgcaatctcagctcaccacaacctcgacctcttgggttcaagtgattctcctgcctcagcctcccaagtggctgggattataggtgcccatcaccacgcatggcctatttttgtacttttagtagagacagggtttcaccctgttggcgaggctggtctcaaactcctgacaccaggtgatctgcccgcctcggcctcccgaagtgctgggattacaggcgggagccaccatgatggccaacttttgaattctgaaccagttgtttgagtaccagagctcttcaataccttgaagaaagattcaggggagagctgttgtgaacagcttgccccagggaaaggacaaggctaagacaatttcagggcttccttgggaaaacagaattgaggaaatgcaaagtgaagaaattgtagctgtcaggaacaagagaagagggatgggaaacctgctactgaggtttggaggtattcctctggagttttcacttataccattctctcatgcccaggaagctgctcatcaccaaaccacaagtcttcctctaactcagtcacaactaagcttctatccagacactgatgatactgtaactgttttgttgtgcttctgattagttgccctgtcaaccataagcagcctataaacagggcctggctccatccttgttacttccccattgcactgaattcagtatttttccctcaaggtagatagttgtggggcagcatccctaaaaatatctagttatattatggcatccagtaaatgtttccttaattacttacctccattaacaagctttatgcaaaaaaaaaaaaaggaatgccgactttagacttttcatctccacttaaaggaagatttctgttgcttttcagaagagatatgttgcatattttgcacaagtgaaacatctctacaactggaatctccctccaagacggatactctttataaaacacttcattatttattcgattcctcgtaagtgctttatgtataattgaagaattgggcaggagggccaatgtccccactctgggagggttttgctcatagttgtatatacagatgatcctaactcatacttgtctttttacatatcctcacacaggaactcctccttatttatgccgctcctcctgcaattgcccattgattgccagcccttagatgttcttcactttttcttttccatcaccaatttgggggacttcatccctttcccatctctcctgttctcattgctcctctggtctcaacccaggcggacttttccgggcagagggagcctctgatgagggaggaggaggacccatgtgccctcaagcctgcttatttctcagaaccacctctagttcagagtttgccttggtggaggtgtctccgtatcgtatcattttctcaccttcttttagaggcattttttttctcatcaccctgggctctccctttcccctctctcctccatctgtaaccctctcactcccagcttacactcaggggaggtgggaaagcaggatgtgtctgtgtggaagggatggggcctcaccactcccactgccggagatgtagcagggaggcgatgcttcagaacccctaaagcaaacctcttctagcagccagcttgtggacctgagatggtgccagtgctgggtgctataggtgccatggggccaggatgctggtgtccacacagacagcctagtatttttagccttctgagtttagttctacatttcactgatttctggtagacatcaatagaaagaagttctgcacttggaatgggaaagagggaactgaggcaagaaactgtgatttctaatgacaaataaatatggtgttagtgaaaacaaaattaaatgaaaacaaacagcatatgagatgaacaaagataatacactagtttattaaaatatttgttttaattctctacctttagttttgtgaacatttaaattaaaatcaatgtagagttgagaggaaagcaataaaaaaattaattggctgagaaaccaagtctttgaggaaatgctaagggaagtgggtcatttcaatttggaaaaaaaggaacaaaaaagcctttgtctgtaaatatatactgaacaccactggaatttttggatataactatcgtatatttttatagagattgcatcaggaactggccttaaagtagggccaaagtacttaaacgacagtatttattattaagaatcattatgattagaagtctgaagaaagcaacatattagcaagaaaggttgcaaaggttgcaagtcacctttcctgaattttcttttttctttttttttttttttttttggagacagagtcttgttctgttgcccaggctggagtgcagtggtgtgatctcggctcactgcagcctctgcctgccgggttcaagcaattctcctgtctcagcctcctaagtagctgggattacaggcatgtgccaccacgcctggctaatttttgtatttttagtagagatggggtttcaccatctaggccacgctggtttagaattcctgacctcaagtaatcgacccacctcgccctcccaaagtgctaggattacaggtatgagccaccatgcctggcctagcttccctaaatattttttctggaaagataaaagtgatgggattctaagtcttcgaagctgaactatatgtattttttttcctcttctctcatcttataaaatctgctttaggagacagaactgggcttgaaggcttgtctttcaaagacaaaatccatgcaagaccaaataagtgactattgatacattgttagcttggataattttttctcattttaatccatgatgttaattggtgagacatattgatgttcacgctagccaacctaactttttaatttcattttgttggaacaggttatgtacgtgatctaaaaatccaaatagaaatggagaaaaaggttgtcttttccactatttcattaggaaaatgttcggtaagagaaaacatgtgaattgaaaaaatctgatgtttgttttaaggctgaatgtcaaaccagcaatgttcacctccctaaactatcactcaccataaagagattccataacgctttctggttaccatccaacttggtgtcattgggtttggatgcaaaccagagataaattaacctgtttgttcaaaacagttttttcagggtgctttccagaatttatttctggtcagtgttgctttccctttcacacttccacaaacactgagcgtgttcccaggaatgtattaaggattttaatttacattatctggtcatttttaaccatattctcttcttctccgtcatttgatcttttgttatatagcactgattctaaaagtttagtgtgcatgaaaactactgaggagcttgtaaagatttacattcctaggttgtacccccaaagtatgattcaggaaatctggaatggggcccaggaatctatagacttagcaatgtcccaagtgattctaagtcagaggttctgtgggatgaccctgtgagaaacaatgcaagagtgaatgaacgggggaggaacctctttatccaaagcaaaagggacctggtagtcaatgttttgcttcaatgaagaaatgcctaaaactatataccttttctgaaacagaaagcatctttcatggtctaataaccataaacttttagaattcctacccaggcctttgtctcaaattctcctattactaaccctattccctgccatgccctccctactctgcgcccggcttttttggcctctcccgactgagggcattcacccaggcctgacccttggctttgtgttcttagcaaatactttactcttaaaggatgacccgttccccttacttcaactattatttgttcatttactcataacaactcataacagccaattatgagcacccgctgagttgtagatgcaggagctacaacatgaacagtttccactccaactcaaatgcattagccagtctgaattatcaaggagctttctctctgcttctgcaaatggcaccagcattcttccactcatgccttgggctttgattctctttgcctcggccccctaaatccagttagtcatcaatctctgttgattatgcctttgacagttttctatgttctccttcctttctgttctcactgccactaattgtccagaatctcctttgctcatgcctagatttccgcagtggtctccttaccctttctttctccttctataatgcaatgtatagaatcctgaaatatgcattctgaaatattgctctcgttgtgaaaaattgtaggtagagcagaagacacactgtgtgcctgtagtcagagccagttaacacctctggctcaacatccttatctgtaaaataaatatcacatctcaagtgtaatgggaattaaattagataatatatataaagtttctttgtaaactataaatcactaaataagtgttatatgtgataattatcaggcctctttgtcacataggaaatgctcaaccatatttttcaacaacgtcactcttatttccttggctcttgagctctgaagatataatagccctaacgtgtaatacctgagcttttttccatgagtagcttgaccagcagacttcattccaaataaactgggtcatcccttttggctcttggaacacaactctaatttagttagttagttagttagttagttagttggttctttctttccttcctttcttcctttccttttttttttttcttgagccagggtctcattctgtcacccaggctgtagcacagtggcatgatcatggctcactgcagcctcaacctcctgagctcaagcaatcccccaattttttttatttttcatagaggctgggacttgctatgttgcccaggctggtctcagactcctgggctcaagcagcctgtccacctcagcctcacaagatgctgggattataaacatgagccacgctgcccgacattatttgttgttgtttttccaatttttttctttttcttttttttttttttttgagacggagttttgctcttgttacccaggctggagtgcactctcgcaatctcagctcaccacaacctctgcctcctgggttcaagcgattctcctgcctcagcctcccaagtagctgggattacaggcatgtgctaccacacctggctaattttgtattattagtagagacggggtttctccgtgttggtcaggctggtctcaaactcttgacctcaggtgatctgcccacctcaacctaccaaagtgctaggattacaggcttgagccactgtgcctggcccatttttctaatttctactttgtgttattgctggtctttttccctccatttggactagattctgttttcagagctcttcttcctttatctaaactgcttcatgcccaattcaatttctacctccttaatgaaatttttgcattctgcaccttctgttaactagcccccaatagtgcataacagcacacccagtctttatcatacagattgagttatgtaccattctactattgtttcttaagtgtacagctccctgaaggggccaactgagtctgcacccccttttgtgtttttcacagggcctagtatagacctttcttattgtgggtgccattatttctatgagaatgagtcaaagaactagtacagcgtcaaagtcattcattccaaaacttgagctatctttggttactccatccagcagcctgcactggtcaagttcaaagatcccattgacaaacacaagagttctgataaaacatgatgagcagggggaccccactctccccctcccttgggaggagcatgctggcccaacccccaagtgttacagacccccgttgttattttttaaattcagaaaataaaaaaccgtgataagttatgcattgctttttgaatgtcaatgctagctttaaaattgaccttcttaatgtattctcaaaaaaggccctaacacataaaaatcaaatgacacacattaaataataatatttaattgattacagtctaatggaaaattcaatactttttaaaagtgcggcacttttgaaaagtgcctcatagctgggcacggtggcccatgcctgtaatcccagcactttgggaggccagggcaggtggatcacgaggtcaagagatcgagaccatcctggtcaacatggtgaaaccccgtctctactaaaaatacaaaaattagctgggcatggtggcacgtgcctatagtcccagctacttgggaggctgaggctggagaatcagctgaacctgggaggcagaagttgcagtgagccgagatcatgccactgtagcctggcgacagagtgagactctgtctcaaacaaaaaaaaaagaaaagaaaagtggttcatgataaccctcaaatatgttggcctttaaaagacataaacaacaggccaggtgcagtggctcatgcctgtaatccagtactttgggagacccaggtgggcagatcacttgaagcaggagtttgagaccagcctgcctaatatagtgaaaccccatcgctactaaaaattcaaaaattagctgggtatgatggcatgtgcctatagtcccagctacttgggaggctgaggcacaagaatcacttgaacctgggaggcagaggttgcagtgagccgagatcatgccactgcacttcagcctgggtgacagtgagactctgtctcagaaaacaaaaagcaaatgtaaacacacacgcataaacaacagtattgcaactagaagagattattaataattatttatgtatgtagtgattgggctgtgagaccaaaagtacttgataaatacaggaagtcatgataagtgaaaaggaacttcattgttatcattatctaggtttatagttctcaattccatgtgttcattcataggtacttgataacattacaacagacaaaatattaattgatgtattcgacggtctacctctgtatgatgatgtgaaagtgcagtttttctattcggtgagtaatcacaaagtagcctctgccattgttcttgtctggtctaatgatttcatgtaagatttgctttactacaattcccaacaagggaggggtagggggaagaaaacaataaatcagatctataacaaatttttttaaaagagcgtatgtaatttaaataatttttgttcatttgtttttttctaaattgtaaattttctaaatttttctaaatttacatgtattctcaaatacaaaaaatacaaaataaacacacacacaaagtcaagatgctaaaaaaaaaaaaccccaaaggtatgttttactgcatagcattgattacattttgttttgcatcttttttaaaaaattaagaaattgagacagggtctcactgtgtcacccaggctggagtgcagtgacgtgatcatagctaactgtagcttcaacctcctgggctcaagcaatcctcccacctcagcctcccgagtagctgggagcactgactggaaagagagttaggtttgggtgactcagttgggtgaaacagagaaggcagcacaatacaacacatgaaataaccgaagcagttttttattaattccagagagaggagggcagcacacttcgcagggccaactagaagggggagccatccaggagacctgtgctcgactgatgggtgggagcaatagcgagagagagggagggacctgagagtggaagcctttattgggatgtaaggtgctacctgagcaggtttcctgcggggaggtctaatttggtttaatgcaagcagctatgagtctctgctgtgactgagaggtggtcactgatatatccacatggtccctgcagagtatgggggtctgtggggtgagtcaagtaggttatatttagctgtcccatagtgaagtggtcatcatgagaaggttgtgtaaggcagatatcaggatcagtcacatggagaaactgggaggaggtgaacgggaaactgctgcgggtgactgaaccccgcttctgatatcagaaaatccaatttataattaaaagggatgctgaggcaacaaaaaaattacaagaattcactacaatgtagttgggtatatatagacataggtccttagtagagtctgtttggcactatctaaaccagattcaaatagcagcatttaaattaaatacctatcatgggaaaaatactattccttgaaaattttgatagaaacagcaagagaatgcagtagcattttcttaaagcctcctcctttgtgtcttgagtgtattgttatagattgcagagtgccacatatttaatggttataattgtttgataaatataaaaaagaataaagaaaggaacttcaatttctttggaatgattagttcttggtatcagttttactttgaaatttttttttctttttagaatcttcctacatactatgacaattgctcattttacttctggttgcacacatcttttattgaaaataacaggtatgaatataatagaaacccatagaaacagcctaatcttcaatgtctatgtataaggtgtaatggcaagtcttttgctggttgtcataaacttaatttatagaaagcaaaaaatccttgaaccaccattgttccttgccttactcttcttactttggttattttaaaaatccatttgttcttgagacccactgttgcagtatcctcagggtccatgccataggactgtgttacgagttcaaaagtattatcatcagatcttaagtgtggtagtaaattcctcccagagaagttcaatatgaggctgctcagcaccttcaatatgtcaggtccctgtcagtaggtgttgatttaccaatgatgaaccaccatcaacttttgtgctaaaggaaggcaggacctagggaggcttcagctagctgaaaagctgactgacacacttatatctaggagaagtcacaagacacagtattaaggaatacagctaagaaatatcattaagtaatagtctatttaaatagccattcaaatatggctttctaataactgaattgggaaacctttctgaaaaattattaattggatttggagattattgttccaaaaaaaccttctgccatatttggaaactcatttctcagtctagaagttctccactgtaagtagcatttgttttgtgatggtgaaaaattgagactttttttgtgtcaaccatactcttcaatacaaaaggacaaaatattttttaaatgatttaggtcagagttgaagaagtggctatgattatatgtggcatgaattgatagttattgttacatccagtcctaatcttttcttcaaatgtgaactggatcgaatgattccttaagtccagcaaggcaacaggaaattaaacctctggtctgcacacttgcaatgcaaaacatttaatggattttgatagagtcaactttgtatttgatggaaattttttacaagtttttttttttggatgcatacaaacaataagctttttattctaacatgagcaaagaccctcaaaaagtgagacctgggtggagcttcatttgatgctgctcctcaaaagtggttcttgctaaaggataccattttttttttcctttaaaacactatgttcattttggagaagtgataagctaggtcacttttattcttattttatataaatttctaaagatttctgtaacatttaaatttacatcctacttggtaaagctgtttttgttatgagattgttgtttagctaaaaatgctaacttctatcattgagaacacgaggcataaatgggttaaccaatttatgcctagtgttccattattggaacactcagcatgtgggagttatatcctactgctcaaggtcatttccaaggtctgattgtaaaaattcaaaaaattgcaacctcacacataaattaaaagagatatagtattttattactgggctttcattcatgtctatcctgactgatttctgtcacagagagaaatttagatattttattaaacttggatgtcattaattccatataaagcaatgctaagagagtcagcatgtgttactgatgtgttgctgaagattaaagtatttttatgtctcagtaaaaaggtggaaggagccaactgagacacaaaaaaagggctgaggttctattcatggtgaggttctttttttgtttcttccagctctaacgtgggtacccaactgtgtggcttttcagtgagccccaatataaaatgtaataatttttttctattcttaggctttatctaccaaaaaatgaattggataatctacataaacaaaaagcacggagaatttatccatcagattttgccgtggagatactttttggcgagaaaatgacttccagtgatgttgtagctggatccgattaagtatagctcccccttccccttctgggaaagaattatgttctttccaaccctgccacatgttcatatatcctaaatctatcctaaatgttccttgaagtatttatttatgtttatatatgtttatatatgttcttcataaatctattacatatatatagataaaatgtcagtgtctttcttcttttttgaaggtacatacttcacagtttccatcttgtatttacctaaatttggaacacagtatgcaggaacatcaggcatcattttgaagaactttgaaatagaactttcaaagcaaaaacttgagatattcaaaaattgtgattccccaacacccacttacttacatatttttggtcaagtatttattccctgctttggttcacatttgtaatttcagatttattagaaagctaatttatatatttttcttccccttcatttacaaactgtctgttaacagattggcaaccaagactaagttttaaatccagaagagagaaatgtttcacgcaagcagtcccccaactcccaacacacactccctttcattccgagcactaaataggtagcttacttgacaagcttcctttaattacacacagacatggaggttggggtaagaagatggtggtaaatatgaagataagtaatctttaataacttctgcttttgtataaaattgtaagtgaagtgaaaagaaatattcttagagtaatctaggtgtattattttgaaattcactattcctgctcacaaccaacttcacctaagcttgggggactctgaagggaggttatctttgcgttataaacactggttagccttatgtctacaggaaatcattattatttcctctttggtgctgggtgctacttttttttaacaaattttttatttgtattttttattttttgagacagcatctcactctggttgtcgagactggagtgcagtggtgtgatcttggttcactgtagcctcaacctcccaggctcaggtgattctcccacctcagcctcctgagtagctgggactacaggcgcatgccagcacacccagctaattttttgtatttttattagagacgaggttttgccgttgttgaccaggctgagctcaaattcctgaactcaagcaatctgcctgcctcagccacccaaagtgctggtattaaggcatgagccaccaggcccagtccatgggtgttaattcattcaaaatacctttattgccactgtatcttccggccatgattgtccttgaaaaccttctatcttggctttattgaaattattcttatttgaatgattttccttttattggcaagtccctcaacaatctagaccaagattcgttcatcaggaaatgaaaggtaacaactaataagacaagtgtcactgctaaaacacgataaactcattcctgaaaaacctagcactctacagaaaggactgaaaaaagaagcagttcatgaaaatacagggtttgagagtccagggcaaacctgtctggcatagcaactttctaaccaacacactaaccgctgggaccacccacatcagcagctcaatgtcgggagtttgccatagagctttttaatttttgagtggaaatagaaaaacacttgctataaggtctgtgggtaccaagtggcacagatgagagtagagccctgagccatggtgggcacggaaggcagcaacctgccaggagccaagagccccactaggttggtgagccgcctcgctgcaggtgacttcttctcctctaaatagtccaaaaaaggttccaactgcccgtgcagcagcccaactaaaggtctttttcctttactccccctgatctggctccttctttgaggaaaagatcgtagaacatgctttcaaattactttcatgttaatattataccctgccatacatacgacagaaacgtgtaggcacaacataggttatgctatttcctttaaaattcacacagcgataatctacagagggcagattatgtcctgggtttaggtgaatagggaggaaaatacttagctggctcagtgaagattaagatctgtctttttcagtactagaaacacaggaaagaaggaaactcccttttttattttaaggatttccctttttgaaataaggagattaccattaaggtttctcttccccagacctccaagacccatcaaaatttctggaaattgtgagttgtcacactattctgcttttgcttattcaaagaaaactcatttaaggcctctttgggtgttgttttcttagaatgcaaaatgaatgattctttgaacaactcaagaaacttagatcagaatgatactcatgtcttaaaattttagctttaattttaaatatgggggtatgtgtgcaagtttgtcacatcagtatattgcaccccggtagagagcatagtacccaataggtagtttttcaacctgcacccctctccctccatccccctctagtagtccacagtgtctgttgttcccaaccttatgtccaagggtacctgttgtttagctctcataggtgagaatatgtagtatttggttttctggtcttgcattaatttgcttaggataatggcctccggctccatctacgttgctgcaaaagacctgatttcactcatatttatggctgtgtagaattccatcgtgtgtatgtaccacattttctttatccaatccaccactgatgggcacctaggttgactccatatctttactattgtgaatagcacagcaattaacatatcagtgtgtgtgtcttttggtagagtggtctttttcccattgggcatatatccaatagtgggattactgggtcgaatggtagctcattttaagttctttgagaaatctccagactgctttccacagtggctgaactaatttacactcccaccaacaatgtataaacgttcccttttctctgcagccttgccagcatctgttgtttttgactttttattaatcgccattctgactagtgtgagatggtatctcattgtggttttgatttgcacttctctgacaattcgtgaagtgaagcatttttccagatgctcattggtcacttgtatgtcttcttttgagaagtatgtgtcatgttctttccacatttttaatggggttatttggtttctgcgtgtggatttgtgtaagttccttatagtttctggatattagacctttgttggatgcatagtttgcaaatgtttcctcctgttctctgggttgtctgtttgctctgtcgatcgtttctcttgctgtgccaaagcgctttagctttattaggtcccacttgtcaatctttgttgttattgcaattgcttttggggacttagttaaaaattctttccgaaggccaatgtcaagaagggtatttctgaggttttcttctaggatttttatcacttgaggtcttacatttaaatctttaatctatctccagttaatttttgtatatgatgaaaggtatgggtcgagtatcattattctgcatattgctagccagttaccccaacaccatttattgaatagggagtccttcccccattgcttgtttttgtcagccttgcaatatcaggtggttttaagtgtaaggctttattctgggttttctattctgttccattggtctatatgtctgcttttgtaccagtaccatgctgttttggataatatagccttatagtttgaagcctctggctttgccttttgcttagatttgcttaggctattgaggccctcttttggtttcatatgacttctagaatacttttttctaattctgtgaagaatgacattggtagtttgatagaaatagcactgaatctgtcaattgctttgggcagtatggccatttgaatgatactgattcttccaatccatgagcatggaatgtttttccatttaattgtgttatctctgatttctttctgcagtgttttatagttcttgtagagatctttcacatcctttgttagctgtattcctagttatttcattttccttgtcgctaccataaatgggattctgttcttgatttaactctcagcctggacattattggtgtatagaaatgctattgatttttatacattgattttttatcctgaaactttgctaaagttatttatcagttctagtagccttttggcagagtctttgcttttctggatatagaatcatatcatcagtgaagagagatagtttgacttcttcttttgctatttggatgcctattctttctttctcctgcctgagttctccaggtaggtcttccagtgctacgttgaataggagtgatgagagtcggcatcattgtcttgctccatttctcatggggattgtttccaacttgtgcccattcagtaggttggtggctgtgagtttgtcatagatggctcctattattttgaggtatgttcccttgatgctgagtctgttgaggtttttaatgtgaagggatgttggattttatcaaaagttgtttctgcatctattgagatgatgatatggtttttcttttagttctgcttatgtggtgaatcactaaatgtgatttaccacatttagtatgttgtaaatatgaacatcatatttgaaccagccttgcatccctgtactgaagacttgattgtggtggattaacttactgatgtgctgctggattctgtttcctagtatttggttgagaatttttgtgtctatgttaatcagagtaattggcctgaagttttctttttgtgtgtttctctgccagattttggtattaggctgatgctggcttcatagactgagttagggaggagcccctcatcctcagttctttggaatagtttcaatagaactagtaccagttctttgtacatctggtagaattcagctcttgcgtcatctggtccagggcttttccttgttggtagattttacattaatgatttgatttttgaactcggtatttgtctatttaaggtttcaatctctttctaattcaatcttgggagattgtatgtttccaggaatttctccatttcctctagattatctaatttgtgtgcatagagttgtttatagtattctctgaggatcttttgtatttctgtgggattgtttgtaatgtcatctttgtcatttatgattgtacttatttggctcttctctttttttctttgtttagctatcaggctatccatcttgtttattttttgaaaaactaattattggtttcattgatcttttgtgtggatttttgcatctagtctaaaaaaacagcacctcaaaaagcacttcattcagtgcttctctaattttagatatttctcttctgccagctttggagttagtttattctttttttctagttcccttaactgcaaagtaggaaagttaatttgagatatttctaacttcttgatgaaggcatttcgtgtgtaaactttcctattaacactgccttagctgcatcccagagattctggtatgttgtgtccctattttcattaattgtaaagaatttttttatttctgccttaatttagtttttcacccaggagttattcaggagcaaattatgtaattaccatgtatttatgtagttttgagagatcttcttgatactgatttctatttttgtctcactgtggtcagagtgtgtgcttggtatgatttcaaactttttgaatttattgaggcttgctttatggccaagcatgtgcttgatcttagaatatgttctgtgtgcacataagaatgtatcttctgtgtttgttgggcaaagtgttctgtagatgtctatcaggtccaattggtcaactgtcaagtgcgagtacagagtttgttagttttctgcctcaatgatctgtctattgctgtcagtgggttgttgaagtctcctgctgttattgtgtgtctaaatctttttgtaggccaagaaaaacttgttttatgaatttgggtgctccaatgttgggtgtgtacatatttaggctaggtcttctggttgaattgtgtcctttatcattctataaggaatgctcttctttgtccttaatttttattcattaaaaatatgttttatttggccaggtgcagtggctcatgcctgtaatcccagcactttgggaggctgaggcgggtagatcacgaggtcaggagttcgaggccagcctgaccaacatggtgaaaccctatctgtactaaaaatacaaaaattagccaggtgtggtagagcacccctgtaatcccacttactcgggaggctgaggcaggagaattgcttgaacccaggaagcagaggttgcagtgagccgagactgcaccactgcacttcagactggcaagagactgagactccatattaagaaaaaaaaaaatcaaccacttagaatagtaacacacgttaagcagatcctgcacctagaatgggttaagcaaccatttgtaagcatcttcatgagaaatgatcacttctgggtttttctggtaacatttgaaataaacatggaaccaaactgtatttccctcagcacataactgtccaaattacatgtgcaagtagaggtttatgtaaaagccctgacagaactgtactcagtcttttgaattaggtgcataaggctactgaccactctctattttaccaagggaaagagcagtgacttctctatttcagtacaattatgggcagaaatgacatgatgcaaaatagaggttcttccatacaatttaagatgtagggtataagggaagacgaaaaagcaaaattcccaagaaatcagaataacttcacactggtcttgtactacaagaaaccctgagatgaactgtagtcctcaaacacctgtgcttggctcaggccgtccaagacacttcagtatgcttccaactggctcatcatcaacttcctggtatattcgtcggccaaaaagagtgctaaatcgtcaggtaatgctcgaatcatagtaggtttcagtccagaatgtaaggccattattcctagaagacaaaagggcaagcaaagactgcaacaatccctcctttggggacacccacgcagctgcattgcacaggtatatttacacatgcaaatccagacaagagtgctaaaaaccaacaagtcatggaaggacgcattcccagctttccctaaatagaccaacagaaacaaggacaagtatcaggtctcctggcaaaactgactgatgctcaggtaacataccccaattccatgcttggttaactcttagtacatggatggggcagtgttgaggcctgagacggccagacagatgcaaccatggagacagaggtggccacagctttgcagcttcacctgggcagtggcaagagcaccaaccttgaggttggagactggtttataatattagtactgcccagggtggttatgaagattgaattagataagggaggtataagtactgtgtaaaacttcgcatgttatacaaatttaagggaggattactatgagtaatagacaagttatctgtgctctatttgggacacaaagtttctgtgttaccgttctctttccttttacaatcaaaacagagaagttcacttctcagattttaagatgtatactagatgctgtaaaaacaggtgtttattcaccttcatttttcacaacatttataaaagttctgataaatcctgcctgttttcaagacatggaaagaacttgaattctggatttgatacaatccactagatataccgcaagccagaggcaaatcccgccaactccctccaccacttaacatcaaagggacagggcctagataaaaaaaaaatagcaaatggtattttatctcaagaacagctgatgtgacatttccagaggtcagcgtagtaatggctgcaggcaggtgcaaatagaaatgctagtgctatggaagagttctttgtggaaactgtcaaagctcttgttcccaggctctaagaacacaaggttttgtttggtagcccaggtctacgcctgggtcttgccaagtacaagaagctctagtgagggttgtatttcgtttggtcactgaggtgtcgagggctggcccacacgaaccagcaggcctccagctgagtggcaacccctcacggtggggagaagacaggccaaacacaatctacctctttttttcttttttcaactttctcattcttaagcattttaatagccccgattcttcctttaccatgtttttattaaacatagcagttaagtctgggagcttgtctaatcccagaatagattcaaaatgctgagggagatggtaagaacaggtaaatgcatttgcattcacagcagtggggtgtgatggtgtttgctccctgcaggtatggtttctgtggattctctgctctttgtgctctcctccccacattggtggctccatctggcacagggaagcttctggatgccagaaggtaacatgttggcaggcagttgatagcaccccaccctccaggcttgataatttccttaggacaggggctgaagcagtacatcccaaactttcttactggaataaggtttgttaatttttctagatctattttagaagagaagaaattcagaaatgaccttcccagttggggaatcacctataaataatcttgaaataagcttaaaacctggtaatctcagtagctttttgagagtagcgaaaaccgtagttctttgtagcttatcatgttttgttggttggtacgactgcatgcgatgtttgcctcacataagtgaatgagtttttcttccctgattccctgtcttctctccccattttgtcctttactaaggaaactgaactgaactgaagtccaggtcttctataatagagagtctctccttcaacagggaacaacactacagtctcccgtggctttgtttctgttcagtctccaccgtggcatgccacactctcctggtttgggccctgctgatttctttactgccttcctgcctgctgtttttgtgctggtaggtcatcccattcatgctcagccctcctcgctgtctacactgtcttcttgggcaatcgtatccagtcccaagccttttaaaaaaacaagctatacccatcctggtggaattcctgcctataaaagggcacaccttcagacctccaggcatgtccagcgaacactgctatgcacacggaaccaaattcagttgtgtgggacctgcagctgcaattgggtttcaaactcccattgctgatgatcaagttaaaatatgaatgtgctggattaaatgctttattcagcttatctgcatctaggttatctaaattacacacccacttaaaacattctgtcacctcttctcttggaataattaattattttaatgtaattcagatctcattttatcctagcccagcagcacctgggagagaatgactcaatcatagtaaaatcatattaaattatattccactgattcagaattggagataatctggcaattaaagtgagaagtgtgtcattcctctcctggaagaaatgaacagtaatgatgggatcacagagatcatacatataagggcccaatacaggttcaaaacatgcccaccggcaactgccttacatacctggctcccaaccatactgttacaatttctatctttcaaactcactgtaaattacaaatgtggtacccaaatacctgtatgcacataaataggaaaaggtaaactttttttttttttttaggtggattttcgctctgtcacccaggctggagcgtaatagcacaatcttcgctcacttcaacctctgccttctgggttcgagcaattctcctgcctcagactcccgagtaactgggattacaggcgtgtaccaccacgtctggctaatttttgtatttttagtagggacggggttttaccatattggccaggctggtcttgaactcctgacctcaagtgaaccacccgcctcagcctcccaaagtgctgagattacaggcttgagcaaccttgcccagccaaaagtaaactttttaattccatcacaatatgttctagatctttgacagactgaaagacatagaatgtcaaaaggtgagactctctcatgtggctaaacaccctcctactgcagatacagaactgagcccaagagcattcacatgctggtgagaagtggtggccaggggcaggcagatggttgcaccaccctcagggtcagcattctccccagtgtggcatggcgaggaggggagggggcacggggcctgggaggctgtagcctaaaggcacgcagtgggcaagagactactgggcgggcccctgccagccttcagttccctgagtgtctggtgccaggacgcttcttgtgggctctgccctgggagaagtgcccttgcccagtgctccttctcggtgtctgtgacacgctgtctccagtcctcctcattagcataacttggctgacctttggctcatggaaaaacactttgctcttctctgaacaatttctttttcacaactgagcaaatgactgatgaggtgaccacactcatgaccatactcatctgttgatggtgggtggggggtggactggatgatgacagcattgggcaacactccttctggcctcaccactgcagggagccgcaattactatgagagtcctgtgggaggccagggtagtccagggtttccctttgggccatcagcattccaaccgctcctcctacttctggcctctggagaactaaattaccaccatgcacttcccattccacctctgcctcagcccgagggtcctgctcttcctgcatattcaagctgatctttctagggagtagcctgcactgtgccagcactaccccttgtcacaggcagcacctccctgtgctgggggagcctcagtctgcccttgggctcaggcccctaggctcaggttagctgacattcccaggaaatcctacaacttctcctttcctttcatggctctaagacacagtccactatcagtctcattgtaaaagacgtttctaaagagtgtcctcctttctttcccaacactagcagggacagtaagtgatgtttcctggactgcagctttttgccgccgccgctttttgcccaccccgggtttttgtccccctcccctcgccaccatgggttgttccccgccccggctttttgccccaccccggcgccgtggctttttgccccccgcggatatttgcccccctgcagccgcagctttttgtctccccgcctccgcgggtttatgcccgccacggctttttgccccccgccgccgcggctttttgccgccgtggctatttgcccccgccgccgcggatttttgctgctgcgcctttttgcccccgccgccttaacaaccttaatttcacttgaaatctaatttcccactgccatgcaacctaacatatttgtatgttagggaattgtaactctgggaattaggacatgaacatttttgggaggctattatgttgtctacagcagacataatctatttacctgcagattaaagtgctctttatttttctgcctccctctcttaattgttttaaaataatatgaattgtaggaaagagaaaagaaagaaaaaagaaggaaggaaagaaggaaggaaggaaagaaagaagaaagaaaagaaggaggaaatgagagaagggagggagggaggaagggagaaaggcaggaagggagaaaaaagcaagaactcaagaaagagagaaagaaagtgagaaagaagaaggaaaggaggaagagagaatggtaaaagggaggaaggcaaagacacgaagaaaataaagaggagaaggaaggaaaaaggaggaaaggaagggagggaggaaggaagaaaaggagggaggaagggagaaaaaaggaaagaaagcaacaaagtgagaaagaataagagaaaagaaggaagaaaagggagaaagggtggggggagggaaggaagaataaggggaaagaaagaaggaaagaaggaaggaaggagaaaagaaagaaaagaaaggaaaagaaaaaaaagaaagaggaaaagaagaaaggaaggaagaaggcaagggaacggaagagaagagaaaggaagatggaaagatagaaagaagggaggaagatcgcaaatattagaaattctgggtttgttagagaatatgccatagtgtttttttttttcacttgaaaagaaagagtatctgccattgcagattggatgtcttgttggtgatattgttgttcttatcttccatatgactactgagtttgtgcctagtctatccattactaagacaaaagtgttgaagtctgcaaatataattttggatttttctagttcacctttgatttctttcatgttttacctcatgtatttggaggttctgttgttagctgcataacctaattaggaggatgcttacatcttcttgagaattgattattatattatctattacctctcatctctgatactatttcttgttctgaactctgttgtatctaatatctatgtagtccttcaacagctttattttattgtttccatgatatggctttctccatatcttgatgataacctatttatatctctatatatttggagcaagatataaaatttagagttgatttttaaaagatttttcaagatttaattcttatttatttttgttctatttgacattctctgagtctcctatatctgaagttccattttctgtcacttcttttagaatatttttggcagttattttgaaaaatatttcttttgctccattatttttccctcttttctttttgggatttcagtcataactagagtaggtaatttcatctcagtctcatgcaggtactttttctcagggtctcaggaatgtagccttctcacacttctgttcttttcctggctgtgttagtgagctcagtgatattcctccttcaccttcaagagcagttttgttttgtttttcctgttttcatactcccagcatcaggagtattctaagtgtggcagtttttgttgccttcccctgcatattaagtggaatatcttggtctatttggactcttataacaaaataacatatactgggtgactaaaaaacaacagatatttctcttttcacacttcttgaggctgtaagatctcaggtcaagatgctcacaaattcagtgttgatgagagcccatttcatggttcatagatggtgccttctttctatgtcctcacacagtggaaggcacacaagaactccattgagcttcttttataaaggcactaatcccattcataagggctcggcccccaagacctggtcacctcccaagtgttctgctctccctgatctgtgtcatatacagactctcttggatttctcaccaattgcttgagagatcgcagtgggtttgtggggaaaaagttttcaagatgatggatctttcccaacttctgcagctgtcagcggtctccgaatttcaccagccccactttgtctttaggaatttattgattattccagctttacttgtcataatggtgtctatttgcatctgtcctatgtaagtgcatctgtcctctttctccttgcaggtgcttgttttccctcacattttgactcagttcttggcaacctggttgctataaaaataaagtcatgactttgaagttagtttggttctttcattgttgtcaggttaggaaacctattccatcccagatctccaaaacccagactttttggggggttgaaattttaggctttctctttgaattgtagttttatcttctttcagttacaatttgcgttttcataatgattaatgagactaagctttttttgtgtagttgactgtacctttggatttttttcccaaatcccttttcattccttattttctttatggttttagaaaatgtagtttacataattgcagcttgattttttactcaggtaatggcatgcttaatagagagaaaaaatattaactatatttccctttttaattactgtgcttttttcttctttaaggaaatatttcattatgttaaattttagtgttattctactcagctattccttaactattatagtattttggatttcacatataaatttgtaacacatcttgagtttattgtatatagagtaaggctattttctatttttttaaggtaaaaatcacataatataaaattaataacttaagaattttaaagcatacaacgcagttgcttttagtatattcacaatgttccaggacaatttcatcatgtcccttctaaaaacccaattatgcatgaagttgttacaccctgttctgcttccctgagccctaatgaccactaatctgatttatatcccagttgatttgccaattcctgatgtttcatgtgaataaaatcaagtaatatttatccttttgtgcacttaacgtaatgctttcaaatttcacccatattataccatgtataagtacttcattctttgttatagctggaaattgggtgtccatttatgagtcaacaagcatatggattgtttccactttttgactgtaagaatattactgctataaatattcatgcatatgtttattttttgagcacctaggttttctaagattaacagctgacttaacagaaacaatggaaggcaagaggcagtagaataatatattcaaaagatgcaaagaaaaaaactgtcagccaccaattccttatcgagcaattatttttcaaaaatgaagataacagaaagacttacacagataaaccaaaatattaaccgaagttgttgctggcagacctaccatacaaaaaaaaaaaaacactaaaataaattcctaaggctaaaagcaagttacacaagccagtcatttgaatccacatttttaaaaaagcactggtataggtaatattaacattataaaaacagtagaaatgcatattttctctttatcataaattgtttataaaataatatgcatataacggccgggcactatggctcacgcctgtaatctcaacatttcgggaggccgaggcgggcgtattatgaggccaggagatagagcccatcctggctaacacagtgaaaccccgtctctactaaaaatacaaaaaattagccaggcgtgatggcaggcgcctgtagtcccagctactcgggaggctgaagctgaagaatggcatgaagccgggagatggagcttgcagtgagcggagattgtgccactgcactccagcctgggtgacagagggagactccgtctcaatgataataataatatatgcataatgtattgctgagtatttgacatgtagaaatgtaatacgtctataacatattttccagtaacatcaacaaggaggtagttggaagaaaaatgtattgtgataaggtaatcactctagatggtaaagcaataattactaaaatatattgttggctttgtaactttaatagatgtaacgtgtaaagtgataatactttaaaatggaggaaataaaagagatttgtataagaatgatgtttctatgtattactaaaagtttactagtataaattggaagatgatttgaataaataattttccatatacctatatggtaaacttacaacaacaaaaattctcaaaaatatatagtaaaataattcattagtaatctagagttccctattttagaaaatattcattcattgcaaaataaaggaataaagaaaaatatttgagaaatatacaaaacaaacggtaaaatggcagacataaatagaattataccaattataatattaaatgtgagcagattaaaatcccttcaagaggcagagattgtcagactggattaaaacaagtgatcccaatatacccggagatgcaaggataccaatggaatgaaagtacaaagatgacaaaaaatatcatgcaaagagcaatcataagaacactgaactcattatactcataacacacgatatacactattaaaaatgtgaataggattttaaacatttatattgtagtaataaggaggtcaacgcttttggtcatagcttttcccgctttttggtcatagctattacagtcatgtatgcacagatatgagctaaattgtttcctctatatagatgctgaaatcttaaccactgaatatgacctcattagaaaataggttctttgcaggtgattaagttaagataaaatcagatgagcctgaattcaatatgactgatgtccttataaaaagaaaaaatttgagtagagggagacatacacatagggagagtaccatgtgattatgaggacagagaatagccaaggaaggccaaagactgccactaaaccaccagaagcgagaaacaaggcacagaagagactttctctcatagcccttgaagggaccatccctgctgacacctcaatctcagacttttagcttccaggactataagactataaatgtatgttgttcaaggcacccagtttgtgttagttggttatggcagccctaggaaactaatacatgaactaataacaaagcacaataacatgaagcaaaaattgacaaaagaggagcatcagcaaaatggtagtggagacagctgcaatctgtcatttccccacagaaacatcacacaactaagagaaactgtccgaataaactttgccaaaactctggaaaatggtcaaaagattacaacaaccaagtgaaagcagactcaagagaaagacaactggaaaactttatgacatttttaacttgcctttgcagcagcaaattggcagttttgaagtatcagaagcccacgttcccagtgaggaaccctagtccatggtccaaaggaacaagagaagatcttaccctcaaattactatgtgtctgttctgactggtctgggggatacctaaaggactcatgaaagacttttttttttctgtgttgctagaatacagaacagataaggaatggacattatcaagaaactctgcaaggagacctaacaagccacagatgcttagggcaaaaattagagtttacacatatagtagatcaccttgagcacaggaagaaaagttggagaagagtatttggaaaactaagacattcaaaatcattcacgtacatgggagggtctagaaagtcacatgtatgcataggttaagccacatgctgacaaatgtcataagaataccctacacttttaccttggccgatccctcccctcagtgcaagctctgtgcaagagtgaacttgaacttcactcagtgcaagagtgaacacacactttgtgccggctttaaagaaccgagtacaaagccagtctgcatggcctagagacatattttgctggacaatgattacttgtttttctttttgtttttgttgtatttgccggtttgcttagttcctgacatacaagaaaatcactgtcaaaacattagcttaacatttgttaaggaaacaaaaagacttcggtgaccacaccttataaagcaaacagttttgtaaatcactttggaaaatttcactaaaaaaaaatccttaacaatataataagtaaagaagatttaaaaccacaaaatattactgtgtttgtagcgggggtgggggtctgatttacagagtaaccacatggtaattataattattataatgtccagttttcaaaaaaagttacaaggcatacaaagaatgggaaagtgtgactcattcaaaggaacaaaacaaactgacagaaaatatctctaaggaaacccagacttcaaacttactagacaaagactttaaaacagctctcttaattatactcaaatgttaaaaggaaaacacaaacaaagaaatcaaggaaacagaaaaaatattaaaaagtaggaatatcaacagagatagaagaaattctggagtggaaaactacaacaataaaaatttaaaaatcaccagagggatttaagagtatatttgcacacacagaagaagtcatgagcttgaagataagaaaatggaaaatactctgagaaacagataaaaaatgagcagagactaaggaatctgtgggacatcatcaaatagaccaacattcatattctagaaggataaattatgttgttgaaaactttagcattctttctttccacctttcttcctccctctccctcctcctcctttttacttttcttcctcttcctttctcttcttctttctctccttcattatccctttctctctgtttctctttctccctttctcttttttcttttctttcaattttctcaattactaagagatgtttaaatacccttaccatgtgagttgatatggttatttctccctttaatcctctttcgagatttatagtcactctaagtaaagagataaccccaaacataagcctcacaaacaggcttccataccactcttaatttggtcctgtaattcttcattgctctattaactttctgatgcttttaaggatgttttataacaaattgtttagtttttttcactggaatgtttattctgaattatctaattcatattgtaaatatagagggagtttaatataaaattattaaactaatatttgtgaaagaatgtatttgtgcatttaacaaatatgttaatcctcagactgttattgggcagctgagcatacagcaataaaaataacataatttttatgtgtacaatatttatggaatacgttactggaacaaataatttagttaataacatgacaaacgacagaaattgtatgcactatagagcatagtaatggaataatgaatgattaaagttattaatattaggtagaaaatgaagggtatctttgagagcagaactcaaggaagcaagcaattcgccttatgaggaaagagttacctgtggataaaggagaatctgaaaaatttacaattcaagactttttgagcaaaaacaaaaatatgactattagtcaccaattcactacagtgaaaaaaaagttgaagagatatcttggaagtaaaccatgctgtggaagagcatgtagggttttgataatcatgggatgattctgaattaattttaaatgcgataggaatatatgagataatttcaccagagaataacatgattgtgtttgcatttcaaaggggtgtatctggtgcactgtgtagaataaataggttatgtgagcaaataaattgggaggctactgtaatccagagaaaacaggtagtgacttaggtgagaatgctgtgaggatgagtggtattagtggtgagaagtcgttaggccatggatgtatttcataggactggccaagagaactgcagctaaattggagtgtagggagtgaaatggagaactcaaatatgactctcagcactggaaggtgacagctgtcactgaagcatgctgatgcctcttattaagagagttacttgggaatggcaagatcaaaacttctcattttcaaatttatgaaaaatattgttttcagaacgaatgactttgggatcagaaagccatcattctaattgatggttccaagactacacgggctcacactcccaagaacagaagtaaatcatcacaaaggtgcttcctgataattctagagaatggagaattactgtaacatctttctgattttaggagaggaacaattccctttttagtctaaatgctatttttttttaaagctcagccaagagactccattataattttcaaaagtgtgtaacttaaattctcatatgaaataccactatgcgtaaattagtcaaaacattttctccatctacaactctatcttgtcattgcaatcattttcacaaaagtgactgcagctcacagaccctaaaaggagaaaatccagggtaggttatctgatctagttagtttcgaagacaggatctagagattatttaatatgaaataggtcacctgaaatgaagtgttcactgaaaacagcttggatcagcccagttttctaccactgaaccatgcatttggtttcaaaaacacaacaactctggctgcttccaactgtgttgaaggtgttaaagaaaacagcataaaattataaatgatcatctgaggcctttgtagtctctgctgaagagactagagtcttccattcttaacgaaacaaccaaatatcttaataattgggcaaaatctaaatatcggagagataattttatcttgaagattgttaaattataatggtgattcactaccttgccacgtctctgagtcaaaaattagaactttgtttaggaatcaatggtactctgcaacttggaaataggaagattttagaagactcaaacactgactttcttgtgtgcaaaaaaaagacaaattgagataagacaagtctttccttgcaatgatacctctaatgctcatacaccacctcccctaacgttaatatagcttccaggtcactaagcagtgtcagagagcagcccatgcaactacaaattcaatagatgttgaacacagggtcaagcctagaataagaagtcttagctaattaagtatgcttttttccccaaattcatatgaacaaaaacttggatatgtcagagaatgcattctaagttcactcaacctaggagggagaaacataattttaaattaagagctgaagcattcttgtcctaacagaaagcaaggaaaacgaaatatcacaccacaggagggatttcacaaattagtgtcaacatcaaaaccttaaaataggcaaggagaatgcagattcacgatgaactcttgtacttgttttgttcagagaagagatggttctgagagaatgacagtgaactaaccccagctggtttagttggtgctttcgactgctgcttctgataaactcctttagctagaacaaattgatgaggattttggcatgtggtattagagatggttattaattttttcctcgtatttgcattgttcaatgtagtaaatactagctgtatatggctacttcaattcaaattaattacaaggaaatatacttcaatattgaattttttagtcactgttggttcattattgaatatcttcagctaagatttcccatctaaatacactaagaggtggcttagttaactggtcgtccacaaatattgaagctgatgttaactcctgatatattctctgcaaagagaatattcataagcctcctcctgaaatcagcagcctagagatagttttataaattggataccagttggaaatctatactctttaagtttttgaaatattagcttcccagggaagaaaatcaaattcgtaagatatgttaggacaatttaactcaagatgttcaaaactgaaatgacatattctacaatatatgataaaaccacccgctaacaacttaaagcaaaacagggattgaccttaaagacctgcctttgcctcatcccccagccaatcagttttcaaatcttgcatttaatttcgaaaggtccttatccccctagtctcttgtttctagacttggcacatatttaagcttgttacctctatgtactgacttttctcttttcaaacagtatctatgcctgccaaatgtgaacatacaaaaaacaaatcagaatgtgccattctgatttaaactgcttattagttaataccctcaaggtaacatctgggttcttagctgcaatgagtcaagcctacttacatcttcttttgtctttggctgcacatttcctatcacatcacactccagcaaagccaagctgtgccggacttctaccccatctccactattttgccctccgtcgcggcggctttttgcccccccggcgccgcggctttttgctcccccgccgcctcgggtttatgcccgccacgggtttttgccgcccgctgcggctttttgcccccctccggtgccgcggttatttgcccgccgcggctttttgcccccgccgctttggctttttgcccccgccgccgcggctttttgtgtttttttgcccctgctcccactgattttgcccccaccaccgcggctttttgcggctgtttgcgcccgccaccgtggctttttgccgccccggctttttggctccgccgccgcggctttttccgcccgtcagcgcagctttttgttgcggcggctttttgcccggcctttgctgccttcttatttaatcagagccttaatttgaacctcaggtcatcaaatctggaaggtgataacaccaaaagagaacactggagctgtgggagggaacaactggggaaaacaagaggactctacccaggaaaagagcaagaacacgcagaccaacatctcatctggaggaagttcagaaacactggaaagctcacacccagactcaggatcacaatatggacccaggaaaagtcgcaaaatctccctttattctattgccttcaaccaatttcactattgtcagttaaatataacattttaacccacctgaaggagctgaaagagattctctggaggagggaacaggtgatgagacaaagccaagcaggaaagaaaaacgaggtatcactggagcatctgaagtctctggtggacacagaacagacttcaactctgatgtccactgcaaaagtaaatgtcaaatgtagctgtgagaagattcacggacatttccacaataattgcctggcaaagataaagtgtggtcaaatacaggcagaaaatggataaaatgaaataagccagtatcaactgtcaaacccaacatgtctggttatcaacaacgattattacatatattaatgagaaataccaaagtcacaataaagaaataatcagaaagggatttataaaagatacaggtattataactaattaaataagatatataatgtaactataattcatatgtaaaaatctcttgaagaaactgtggacataatgcaggactagataggggactgagagatgaaaatactaagaagtaatcaaatggaaatgcatgagaaatcaaaagcaatgcagtatgaacattgagcaatctttgggcacactgctcattagagctggctcagcttttaaatgaaaccatgcacttaaaatgtcactagaaatttaacaagtaaattgcaaaggaaaagagtgaagaaactaaacaatatcaaaagtgtagtaaatgtatactttaattctgaaaagtagaaattatagatacagagaaagtatttgaaaaaataatggttgagaatgttcccaattttgtgaaagacactgaactacagatcccagaatcacagagaaccccaagcagagtaaacacagatacagacacacaccacacatccaacatggacagcgtggttaaagaaaaattgctcacatcacacaccacacacatttcatcaactttattccttttgcttagttgttttaaatgtattggcatttatagtattaagtagaagtctataattaaaatatattattctatgcataagtctgtctatgcttaccatgatcaaatacacagcttggtgcaaatgagtgtaactatgttgttaggaatttcactatttcaaataaaaatggtatttttttcaggctctgtgttgaatcacttgtaatgtatggcaatacaatcctttttaattaaaggattttttaggttggcagataatgattgtttatatttatgggatacagtgtgatatttcaatacatctctgccatgtggtttgaccaaatcagaacaatgagaaaattcatcagctcagacattaacatttatttgtgttggtagcatacaaaatgctctcttctggctacttgtaaacgtacaatatattgttagctgtagtcatcctactgcgctgtagaacactagagcatatccctcccgtctacctgtaattgtgcatttgttaacaagcctcttcttgtctctcagtctcctcccatttggagcatctcataaccactactctactatttacttctagaagatcaactttcttaaacttccacattaaattgagaaaatgtggtatttatttttctagtctgtcttctttcattcaccataagggtgtccagttccaaccatgttgcttcaaatggcagaatttcatttttaaggctgaataatatttcattgtgtaaatttacctcattttatttatccattcatctgttcatggacacatatgttgatttcatagcttagctatttcaattagtgctgcagtaaacatgggtgtacaggtatctcttcaattttagttttttcttttaattatttaaatagataaatactcagcagttggatcgctgaattatatggcagttctatttttttcccatgatggctatactaatttacatttccaccagtggtcaataagagtgtccccttctatgcagccttgctagcttttgttttccttattttggctttctgttaacagaatttccagcaaagatgaaggatgaaaagatatctcattgtgaatttgcatgttcctgaatattagtgctgtctagcaatatatgtgtgcatatatacttatcatctatctatctattgatcctttccacgtcttccttggacagatgttcattcatgttatttgcccattattattcagattattaattgcagttcagttaattttatatgctttatagtaatcccttgtcaaatgaacagttttcaaatattgtctatcatctgcaggttctctcctcactcaactgtttcctttactgggcaggagctaaaatttcttgatagaacctggacaggtgggctgtggagctgtgggacattggaggagaagagatggtctccacttgctgtaagctcacactatattcttcgcttactctctgaaccattttatgagggtagtgatgagccctcactaaatttaatttaattttcagtaaatggaaattaaatggaaattgtatatcttctcagcatgaatcccatgggcagtcatgaattattcttctggttatagtaattgatttttcttggcatgttcattactagtaatattcaaagtcatttcatttaaatctttgatgcttaatttttttgtttttgctatgacattctttcttctattgaatcttccctttagcattataacatgatccagtacccaggctcagttgtcgttaatagtaaccacatatgttaaaaactatgtcttctttccacagcagacaagattttctcttttctggggatgaacacacactgctgagctacccccactcacaagaacatatccacaattatgatattttcatttatttgactaataagttatattattctcccttcaagttcttcacccctcagaagtcccggacaaactcttctgcatctggtcaaaccataaactcagaaacaaaaccacatggtgagtaaaagcttacttgattctggatattgggtccagctcttccccatttatgtcccacagcacctcagcccacctgtccaggttctatcaagaaaccaaaactcaggggtggttccaaaatggccgaataggaacaactccagtctacagctcacagtgtgagcgacacagaagatgaatgatttctgcatttccaactgaggtaccaggttcatctcaccggggactgtcggacagtgcgtgcaggacagtgggtgcagcgcaccgagcatgagccaaagcagggcgaagaatcgcctcacccaggaagtgcaaggggtcagggaattccctttcctagccaaggaaaggggtgacagatggcacctggaaaatcgggtcactcccacactaatactgtgcttttctgatggtcttagcaaacagcacaccaggagattatatcccgtgcatatcttggagggtcccacgcccacagagccttgctcattgctagcacagcactctgagatcaaactgcaaggcaacagcgaggctggggaaggggggcctgccattaccaaggcttgagtaaataaacaaagtggccaggaagctcgaactgggtggagcccaccacagctcaaggaggcctgcctgcctctgtagacttcacctctgggggcagggcatagccaaataaaaggcagcagaaacctctgcagacttaaattgtccctgtttgacagctttgaagacagtagtggttctcccagcatgcagcttgagatctgagaatggacagactgcctcctcaagtgggtccctgacccccaggtagcctaactgggaggcactccccagtagcggcagactgacatctcacatggccgggtactcctctgagatgaaacatccagaggaaagatcaggcagcaacatttgctgttcaccaatattcactgttctgcagcctccactgctgatacccaggcaaacagggtctggagtggacctccagcaaactccaacagacctgcaactgagggtcctgactgttagaaggaaaactaacaaacagaaaggacatccacaccaaaaccccatctgtacatcaccttcatcaaagaccaaaggtagataaatccacaaagacggagaaaaaacagagcagaaaaactgaaaattctaaaaatcagagtgcctctccttctccaaaggaatgcagctcctcaccagcaatggaaaaaagctggatggagaatgactttgatgagttgagagaagaaggcttcagactatcaaacttctccaagctaaaggaggaagctcaaacccatggcaaacaagttaaaaaccttgaaaaaagattagacgaatgactaactagaataaccaatgcagagaagtccttaaaggatctgaaggagctaaaaatcatgacacaagaactgtgtgatgaatgcatgagcttcagtagctgattcaatcaactggaagaaaggttatcagtgatggaaggtcaaatgaatgaaatgaagtgagaaaagaagtttagagaaaaaggaataaaaagaacaaagccttcaagaaatatgggactatgtgaaaagaccaaatctatgtctgattggtgtacctgaaagtgacggggagaatggaaccaagttgcaaaacactctgcaggctattatccagaacttccccaatctagaaaggcagaccaacattcaaattcaggaaatacagagaatgtcacaaagatactcctcaagaacagcaactccaagacacataattgtcagattcaccaaagttgaaatgaaggaaaaaaatgttaagggaagccagagagaaaggttgggttacccacaaagggaagcccatcggactaacagtggatctctcggcagaaactctacaagccagaagagagtgggggccaatattcaacattcttaaagaaaataatttcaacccagaatttcatatccagccaaactaagctccataagtgagggagaaatacaatcctttacagacaagcaaatgatgagagattttgtcaccaccaggcctgccctaaaagagctcctgaaggaagcactaaacatggaaaggaacaaccggtaacagccactgcaaaaacatgccaaattgtaaagaccaccaaagctaggaagaaactgcatcaactaacgagccaaataaccagctaacatcacaatgacgggatcaaattcacacataacaatattaaccttaaatgaaaatgggctcagtgcaccaattaaagacacagactggcaagttggataaagagtcaagacccttcagtgtgctgtattcaggaaacccatctcatgtgcagagacacacacaggctcaaaataaagggatgggggaagatctaccaagcaaatggaaaacaaaaaaaggtaggggttgcaatcctagtctccgataaaacagactttaaaccaacaaagatcagaagagacaaagaaggccattacagaatggtaaagggatcaattcaacaagaagagttaactatcctaaatatatatgcaccaaatacaggagaacccagattcataaagcaagtccttagagacctacaaagagacttagactcccacacaataatagtgggagactttaacaccccactgtcaacattagacagatcaacgagacagaaagttaacaaggatatccaggaattgaactcagctctgcaccaagcagacataatagacatctacagaactctctatgccaaatcaacagaatatacattctttcagcaccacaccgcacttactccaaaactgaccacatagttggaagtaaagcactcctcagcaaatgtaaaagaacagaaattataacaaactgtctctcagaccacagtgcaatcaaactagaactcaggattaagaaactcactcaaaccgttcaactacatggaaactgaacaaactgctcctgaatgactactgggtacataatgaaatgaaggtagaaataaagatgttctttgaaaccaacgagaacaaagacacaacataccagaatctctgggacacatttaaagcagtgtgtagagggaaatttatagcactaaatgcccacaagagaaagcaggaaagatctaaaattgacaccctaacatcacaattaaaagaactagagaagcaagagcaaatacattcaaaagctagcagaaggcaagaaataactaagatcagatcagaactgaaggagatagacacacaaaaagcccttcaaaaaatcaatgaatccaggagatggtttttcgaaaagatcaacaaaattgatagaccactaaccagactaataaagaagaaaagagagaagaatcaaatagacacaataaaaaatgataaaggagatatcaccaccgatcccacagacatacaaactgccatcacagaatactataaacacctctacgcaaataaactagaaaatctagaagaaatggataaattcctcgacacatacaccctcccaagactaaaccaggaagaagttgagtccttgaatagaccaataataggctctgaaattgaggcaataattaatagcctacgaattaaaaaatgtccaggaccagacagattcacagctgaattttaccagaggtacaaggaggagctggtaccattccttctgaaactattccaatctatagaaaaaaagggaatgctccctaactcattttacgaggccagcatcattctgataccaaagcctggcagagacacaacaaaaaaagagaattttagaccaatatccctgatgaacatcattgcaaaaatcctcagtataatactggcaaactgaatccagcagcacatcaaaaacttatccaccgtgatcaagtgggcttcattcctgggatgcaagtctggttcaacatacacaaatcaataaatgtaatccagcatataaatagaaccaatgacaaaaaccacatgattatctcagtagatgaagaaaaggcctttgacaaaattcaacaacccttcatgctaaaaactctcaataatttaggtattgatgggacgtatctcaaaataataagagctatctatgacaaacccacagccaatatcatactgaatgggcaaaaactggaagcattccctttgaaaactggcacaagacagggatgccctttctcatcactcctattcaacatagtgttgcaagttttggccagagcaatcagacaggagaaggaaataaagggtattcaatgaagaaaagaggaagtcaaattgtccctgtttgcagatgacatgattgtatatctagaaaaccccatcatctcagcccaaaatttccttaagctgataagcaacttcagcaaagtctcaggatacaaaatcaatgtgcagaaatcacaagcattcttatacaccaataacagacagagccaaatcatgagtgaactcccattcacaattgcttcaaagagaataaaatacctaggaatccaacttacaagggaggtgaaggacctattcaaggagaactacaaaccactgctcaatgaaacaaaagaagatataaacaaatggaagaacattccatgctcatgggtaggaagaatcaatatcatgaaaatggccatactgcccaaggtaatttatagattcaatgtcatccccatcaagctaccaatgactttcttcacagaattggaaaaaaactactttaaagttcatatggaatcaaaaaggagcccgcattgccaagtcaatcctaagccaaaagaacaaaactggagccatcacactacctgacttcaaactatactacaaggctacagcaaccaaaacagtatggtactggtacctaaacagagatatagaccaatggaacagaacagagccctcagaaataatgccacatatctacaactatctgatctttggcaaacctgaccaaaacaaaatatggggaaaggattccctatttaataaacggtgctgggaaaactggctagccatatgtagaaagctgaaactggatcccttccttacaacttataaaaattaaattaagatggatcaaagacttaaatgttagatctaaaaccataaaaaccctagaagaaaacctaggcaataccattcaggacataggcttgggcaaggacttcatgtcgaaaacagcaaaagcaatggcaacaaaagccaaaattgacaaatgggatctaattaaactaaagagcttctgcacagcaaaagaaactaccatcagagtaaacaggcaacctacagaatgggagaaaatgtttgcaatctactcatctgacaaagggctaatatccagaatctacagagaacccaaacaaatttacaagaaaaaaacaaacaaccccatcaacaagtgggtgaaggatatgaacagacacttctcaaaagaaaacatttatgcagccaaaagacacataaaaaaatgttcatcttcactggccatcagagaaatgcaaatcaaaaccacgatgagataccatctcacaccagttagaatggcgatcattaaaaagtcaggaaacaacaggtgctggagaggatgtggagaaataggaatactttcacactgtttttgggactgtaaactagttcaaccattgtggaagtcagtgtggcaattccttagggatctagaactagaaataccatttgacctagccatctcattactgtgtatatacccaaaggattttaaatcttgctgctataaagacacatgcacatgtatgtttattgtggcactattcactatagcaaagacttggaaccaacccaaatgtccaacaatgctagactggattaagaaaatgtggcacatatacaccatggaatactatgcagccataaaaaaggatgagttcatgtcctttgtagggacatggatgaagctgcgaaccatcattctcagcaaactatcaccagaacaaaaaaccaaacactgcatgttctcactcataggtgggaattgaacaatgagaacacatggacacaggaaggggaacatcacacactggggcctgttgtggggtgaggggagtggggagggatagcattaggagatatacctaatgtaaatgatgagttaatgggtgcaacacccaacatggcacatgtatgcatatgtaacaaacctgcacgttatgcacatgtaccctaaaacttaaagtataataaaaaaaaaaagaaatcagcacaattggaaggctactccaacagagagaatttggacctatttaattaatagactggaattcactcaaagacactctcctatgggatctcaaacttaagcagatctctgtaagctgaagaagtttcctcaacagatatttttctctaggcatcaaaaaatggaaaaacacattttggatatttgtgcatgagtgatctgtagaaggccttggcctattaatgaaagttcatggatatatgataacttcatcacttactgtgcactcacacttcactggtttcaaaaattcctcacccgtgtgatggggcaatgcagaagaagacacaatagtgccatcttcctcatgaacacaactctgcattccccagataacttagccctgcctgaggggagagctattagctttcacagtccaaaagcatttcattccctggagcctgaagaataatttggatgtggaacaaccttgtacttataacagagaaggacagaggtcagactcccactggatttgaatatgttttcttgttttctgtttattttctggttgatgtgaagcattttcttgccaaaaattacagccatgacatttgataaaatctgcttaatctgattttcccacctgtgacatttgtacttcatcaagtgagcaatgtgcataccttacaggaacaattacaaaataactctctaagtcatcagtatcacacaaacgctatcctgtccttactgccaaatatcttctggaaagatttaagtaaaaataaatcataaattgcatctttaagttaaaagtagcataatatccagaaactcaggaactccctttgccaaaggtactcccaccagaacttacaacccttagtctgcttcctcaaggacacagacattatcaccctatggcttggttcatcaaaagcccatgtatttcccattttaccttcagttttatatactgattaatcgcaagccgatacagcaaagtattttaagggattgatgtgctatgcagaatcattcaacaggatgttaaagatggcttcctggccaggcgcatcaactcatgcctgtaaacccagcactctgggaggctgaggcgggggggatcacctgatgtcaggagttcgagaccagcctgacccacatggagaaatctcctctctactaaaaataaaaaattagccgggcgtgttggtgcatgcctgtaatcccagctactcgggagtctgaggcaggagaatcacttgaactagggaggcagaggttgcagtgagctgagatcccgccattgcactccagcctgggcaacaagagtgaatctccatctcaaaagtaaataaataaataaaaatatgccttccaaatatgccaaatagatcttcctaagtatcttctttattggcgtcaacttggaaattctttattttagaagagatatcagagaaaaattgcttcgaatattgtaaagggggcttattaacattaataagaaatgcagcagtgactacaggatgtcaatccataggtttatgaagtgaaaatgaggtgggttacataagctgttttgaaagaattatcctgtgcttgtagaatcaataccaagggtggcatcagtataaggctgaacaggcagtcgctggacacatatctttgtagaaggaagttttatatggtgttggtggcttctatccaaggttgtgattaagcagagtcaatttatggtagttcttcttatcaggagtatgtgcatgcgaaccctccttcatggtcattcctagttccatttgtcagggttttaacacaagtggctccattttgattctgacaactttcacacactatttataacgccactggtgaggaaggtgactttgtggtagcttgcacagcacaggacaaatttcatatccacatcccattttgtccacacaagctcatccccttcactactattggccacttcctttcccaggtgagtctccacacaacacactggatggtctcgtgcaatgagagagaagaaagtcccatcagcctctcccgtgtggctgcaggagccacagcctgagccccacctgagctgcaaggaatgggcttgagccctggagctttggcagcaagaaccacatccccactttacagggagcagcagcagtacaaggaaaagcaagaataacaacaacaaataaagagaaacagaatgtgctaggagtaaaagggccccagatcggcgctgatactgattggcatgctttattgttggtggagaagggtcagacataaaacttgtgaggttctatctgacattgatctggcccagcctctgtcttggctgaggttaggattcctgagactgttctcctcagggaaccccgctaaggttcctgtcccgaatgtgactgaagaagattcaccaggttaccctcagcttcctcagggctgtgatcctagtgaccactggcagagagattgctctacatttagggcctgtgagaaggtttcctcctggtacaacaaaactgtggtattttagagatgtagagctagacacagcaccatgaaataagagagggtccctggaggaaacatgaagatggtgaggcaaccccagaacctggcagtaaaccaacctctcatctctacccccaactgctctggggctggccctgtgcttcctgcaacctgctcttccctggtggtcttgagtcccctctgtggtcctgagtcttcctggcagtcctgagtgccctgccagcaagttttgtgtcagggctcacaaggacaccttctcattaagtctttcacagtaatactcagctgtgtcctgggcagccatggagctgagcttcacagagaactggctcttggttgagtcattgttgatggggacatggacctgggtggagggagcatgatgtgtattccttggtgatcgactctagtaactgtgccccagccattccagcctgttgcccaggggatggtggattcagctcaaatagtatccatggtaaaaaagaatccagacacagcacatgtggagggcagtgtctgagggcctcatgggtcctggacctgactcctgcacctacacatgggacaggacacctggaataagagggaacatcctggtgagtcacacagagagctcacttgtccacatcaacccttttttaaattctagatgttcaccctgcaaagctgtcagcaaaggaagaaatataagtagttgatcttcttgagagaaagaataatgtctttcatggggaatttgttccttggctgatgacagagcggtatctggggaggagaggggctgacaacacccagcattgttgctggggtgtaaacagagtttgaggagaagtgtgcatgtgccaggagccccgcacatataaggggcaggaactacggcggacctctgtcttggaacctcttcccaggcatgattttcctgctcaggagtcagatgacacaaactaattcctcctctgaaagagcatccctctgctgagtgtcaaggcatccattcttaccccaaggacaggaaggcaggtgacagaaacaagcaggtttgctggacagagaggaaaggaaaggggtaggaactggggaaaaaccttgtgcacaagacctatggcctaaagtccccctgcctcttttggggtcccacctggagctggagattctccattgtgaactttcctggcacaggaaatttcttgagggaaaattgagggaaatgttgagtgagttctcctctttgctgagcacagaattctcaccctctcttgtacgtggtgttttccctgtccggttgagtcaccgctcctggtcccctccctgctactccccaggttttgcttctttgctcatatgcttatccttttctagatttctcttcatggagcccccattgtagccttgagtgacaacatcaccctagttcacaacaccttagcatgcctgaggactccttttgtaccactgtgaacacacacacacacacacacacgcacaccagttccccacatcccctttcaatttcatacaggaaaactcatgactgtgttggggaaatcatttgcatgggccataggagacacaatgaggtatcatctgtctctgagaatacaggatctccatgtccaaggaggtgagagactgcaggtgcacagaagcccaaggtttcaggatctgggagaggaatcacaggagaccaagtacagcaggactggccaagaggaccaaagctctgatggtagactttgaatgaggaggacaaggtgaggcctgatcttatggcctttgtcctttctgttgatgtgatgtgtcacattgattgatttccatatgttggaccatccttgaatcactgggataaactgtacttggtcatgatgcatgatttttttaatgtgttgttgaatggtgtttgctaagttttccttgaggattttcgcttctgtattcatcagagacattggcttgtagtgttttttatgtttttatttggttttcatttcagggtaatactggtctcatagagcaggtttgaaagtactccctccttctctacctattttttaatattttgaggaggatagatattgtttcttctttaaatatttgtcacaattgcgcaatgaagccattgagtcctgggttttttttctttcctggaagaccttttattaatgcttcaattttgtgacttgttattgccctgttcaggggttggtttcctgctgggcaacaccagagccaaaggggatcttggctctaggctttgtgcagctagtattttggcctttacccacttgtgtgtttgatggaatggaaacagaggcccagtgtggagacatgcaatgactactgccccaaagaagggcaccctccagaagtgtctctggtctcaaagttgtgacaggctatagcattttggctaatgggatgggtggtgggcaaggaatacagattttgctcctaatcttgtgcagtacagatgcatgaattccttccagctctccaagttgagctcagggtttgcaagccctgtgaatttattttacagtaaggattgttgacatgtgtgattgcagtggggtctgatgtgcttcttctacttaactttcctcaccagggataatcccatgtgaatctcgagtatgaagctgcagacacagggtgctttcactattagaagcactattgggcttctaataaccacagggacctctcctctcccctgctatcctctacttctccctttcatcagtccagtctagtcttagctgtttattcaattctgtcattccgtcatatgggattgacgaatgtcaggcacatctattcagctgtcatgctgattttttttttaaattttagttacatatttatagctaacatggacactaaaattggtaattcaaatttataacaaaatagattgaattatgattaccttagcatcgatagtgcatacaaatctgtgtctctacagctctatccatcttcccttactgtgttattactatatattagtattttacaaattatatgtatattatttacatgtataattaatattatggtacttgattttcaaaataatggaggaatgaaacatgagactcagggcagaataaaacactattggcgctcacatacacaaatgtaatgacatttctgggacaccttccttgttgctgttgttctttttaggtgtaagattttctgctcctctccactctcctttcagttcagtctgtgggactccatatagcatttctcataaggactgtctaggttccatgaactccatcagcgtttgtttctttatattcaccttaatttctccttcacttttgaaggtttctttgaaagtgtataattcttgattgacagtgtatttcagtcttttgatacgccacctcaatgagtttttgccttcatgaatttggtgagaaatcagttgtttattttatgaaggttttattataggcaacgcttctttctcaggttctgacactcaaacatacttgatattttcagacatgtgacactgaggtcaagagatgaatctctggcgaggtggggtggctcatgcctgtaatcccagcactctgggaggccaaggcgggcagattacgaggtcaagagatcaagaccatcctggccaacatggtgaaatcccatctctactaaaaatacaaaaattagctgggcatggtggcacacaccagtagtcccaaatactcaggaggctgaggcaggagaatcgcttgaaccctggaggcagaggttgcagtgagctgagatcacgccactgcactccagcctggcgagcagagcaagactccatttaaaaataaataaataaacaaaagagcctgggcacggtggctcatgcctgtaatcctagcactttggtaggccaaggtgggaggatcacctgaggtcaagagagaccattctggccagcatggtgaaaccccatctctaaaaaaagtacaaaaattagctaggcatggtggcacatgcctgtaatcccagctactcaggagcctgaggtgggagaatcgcttgaaccagagaggcagaggttgtggtgacccgagatcatgccactgcactccagcctgggtaacaagagtgaaactccaactcaaaaaaaaagtctctaaaagcatgcatactaacaatccacatgtatataaacatgctcacagactcacacacactctcaacaccttcatatgtagagtcacaggtaatgacccccccacacactcaggggcacacactcaccaagtaatacaaagagcacacacacactcaaatattcctggtcacactagcgtcaaatcaactatattcacttctgaaaggaaagtaaatcttgggaccctaagatcacaccgctgaagagaaaagtcaagttagaaactactagggcaaacttgtctactactctattcaaagtcatccatctgctcacagagataaaagcatatctgattgagtcttttggaaaagctaatcagaaactcaaaagaatgcaaccctttgtctctcacctacatatggaaacccccttcgagttttcacatctttctggaatgaatcaatgtattttttttcttaagacagagtcttgctctgtcacccagtctggagtgcagtggcacaatctcggctcactgcaatctccacctcccaggttcaagcaattctcctgcctcagcctcccaagtagctgggactgcaggcgtgcatcaccacacccagcaaatttctggattttcagtagagatggggtttcaccatgttgaccaggctggtgtcgaattcctgacatcaaatgatctgcccaccttggcctcccaaagtgctgggattacaggcatgagccactgcaccaggccaaccaatgtacatcttacacatattgtttgatgtctcatgtcttcctaaaacgtataaaaccaagctgtgtcctgaccaccttgggctcatgtcatcagaacctcccgaggctgtgtcataggtgtgtgtctttaactttggcaaaacaaacttcttaaattgcctgacacctatctcagatactttgtattcacctagtcaagtatgcaactcacacgtactaaggaaaattaacattcatgcaaattgataggctcaaatattgaagaacgcactcacacacactcaaaatagcatacgcttttacaaactaactcacagaaacacacaaacacgttctcccacacacttggtcgaagatatagtgtaacaatcacaaagtaagtaactcattttaatataaaacacaggcacacacaagctcacaccctcacacaaacacacacattcacaaacacacagacacagttgtatgcatcatcccacttacacacaatgttctatagtgacacacagacaaacattgagactattccatgaccaggggcttgagacagtagctgtctcagtctccatggacgtcacactgtctcagaggctcaaggtttgctttccactacagcaggtaaccctgaaatttccctagatgttaatgattgtgtcttcccttccaccatctagattctcctcagagatggccaggactccagagttcaggttctcacatgttgtgtggcttttgggctaaaacacacctgaaacactgagtggctgttgtccttgatcacttgatcatcatctgcattttggttgatgcattttttacctcattggaataaaataaaacaaattaattgactctacctgggccaaatggacttctttctgtttctcttggtagctgcaaatgtagccccaaatatgacaggatccagtaagcactgcagctcttaaaacactttcttggtcagctggtctaacagcataaggacctcaggagaacaattatattatgggtgtaattctgtacccactgcagaccagtttatttttatagaccagcagctccagtctatcacaacctatgattatccagatggaaggaaacagtcttcaaatttttatgacagatgcggaaagataaactgatatttctgtcatttgttttctaggcccaggtcttgtagctcctggccacggggcactgtggtgctctctgatttggggcgtttgaaggatactggaaaatagtattgtcctcaaaacggactttctttagagactaatttttctactatgaaacagtggcataaaacatctggtataatactcgtatgggactggagagactgaagtcaattctcccattgttctcctgggtctctgtctgggcaactgtgaaaagacaaagcactgctggatccctgctcatgttcttacgatcacatctcctatccctaacaacagctacattcctttgtgtcagaccataatatgcagtctctcatactgggaaataagatatccagaacttggacagtggcgttagcaggttctctatggaaaaaaaaagaaacaacaaaacctaaaaacatcccatgtgaagataggagtcagtttctcattataaattactacctatcaagtttgggctttatctaaattattcaaattgtccccatatggctggtggatatccttaaagggtgtcgtttttttgttagacaaatgtgatatctatcactatcagctcaggcactcgctgagaggttctaggttagtctggtggaaggtatctgtgctgagtcttcattgtacatgttagggaaagttttgatataaagagagaggacactataacttgcgtagcagtattaattaaactgaagaagataatcatactatgagttccccatactcacttacccaggataatggatttcccttttcctcagctgttggcttacttaccttaaatattacagcatttacttttgtttacaatgttttttttatcttaggttattgcctgattaaagtaagcacaagtaaaatttaaaattaacaatcaatcacctgtagaaataacaaaaaatgggcttggtgaaatttaaggagcgatgccagaattaaacaaataaagaaacacattgtgtaagttagagtggtcagtgaggagtgaaatgatgagaagctggtgctgaacgatatatgaagaacgtcaaatacacttgatattcagaatgctggtcacaacagtgaaaaatctgtagagtggtctgcgcagataagaaattagaaagtgagaaagtcacaaactttcaacagcaggagacatgcaatatattcagtattcagctctctctgtcctctaggaaaaataggttataactgcatggaaaatgagacaagtagtttttaagataattctcgagaaaagttgctaataaagttattcagatgatgttccgacacaggattgtggaggggacgttgacccgtggttgtcactgtcagctatacgggatggtcaacttggtggtctcctttgccaattttttgtccacaagagagattacgctgtcatgtgctatgttgcagatgagtttcttaacctcacaccatgagaggaacatgagaacaaagaagatgagaaaactgaagaccacactacatcacctacattccactgatgagaactcgtcacacagaggcccagggatgagcagggaagacaaaggggctgggaaatatcatccacaaagggacacctccaggctgcttgacctccccatgcaaggagaggtgaaatgtttgttctcagctaatggtggctatgtcaggacctccacaagctttgagaaatacagatttgtatgaacaaatgcccatactttattcagagggaatattttactcataatttatttcctctccctagcaagcaccgcagaaggatgtttccatgattctccctaatccttcctcagttcctggtgcagttcctggaggaaaagcctgcatgggggagggagccctcctcatgtgcagccctgaggctgtgccatcacctcacctactattgcccttcagtcagtttttaaacattccaaactaattttcctgaaatgtgtagtatttggcagtgtctttcccagataagaaaatacttaagttctgtttatccctgcaggcgcatatccatttctggaagtcaggtggtttttgaatgtttagtagtggataattagtgggaggaggtttgtgtgcatcttgtcatcttccagagtgcaccccaatatggcattgacactggcaagcaagcagatgggcttgttcagctggagaatggcagacattgttataacctgtgaccccaatgaggctctccctctacaagcccaatcaggctcatgcctcttgacaacgtgcagccagcacaggacaccagtgtccacctcagtgaggggccttccaggtgcccaccttcttcctaagggggagcttttgtccctgcctggatcccacgcatgtgcttgcatttgctgcaaaaagggattcatccgtaaacacaccccacgagcctacagtgtaagtaatccatctacagggcctcatacatgacatctctcatggccaaggtctccatttctcattaaagaacattcattgtagaattcactagaacttgctggacttttagaggcatggataggaataaccttacccactttccctctaatatcattcctagaaaccctctgaaaatacctctggtgctccaagataatttatgtttgttacaccacgggatcaccaggaaaagaaagaaccaaagtgtccatgtaggttcatcatttgtaacttgctgatatgactctggtgcaggatgcagatagtggagaaggctgtgcctgtgttggacggggattcatgggagctctggtactttctgttcaagttcactgttatcctaaaaccactctaaaataaaatttatgcaacaacagtagcagagacattcttggaagacattttggacatttttcagaatcatacttagtcttaccatgtgatcaaataatcttgctcaaattattcatccatctaatttgaaaacttgttcacaataatatactcattgatatgattttattgatatggtttgactgtatccccacccaaatctcttcttgagttttaataattccaatgtgttaagggtggggtcaggtggatgtaattgaatcatgggggcggtttcccccatactgttctcgtggtagtgaatatgtctcatgagatctgacagttttataaacaggagttcccctggcacaaggtctctcttgcctgctgccatgtaagacatcagtttactctttcttcatcttcttccatgattatgagaccaccccagccatgtggaattatgattccattaaaccacttttctttataaattattccatctcaggtacgtctttattagcagcatgataatggactaatacagggcctttactaatctttgaattttctgtatacggtgactcttgaataaaatatttatcataaaattagagtgtgtccttgtttctattgatccttgtcctcagttacttgacccattttctaaacaactttaaacctcatcttccctgtcatctcctctgcaggaacacagctgcctcctccctgcagtttctgaaactctcaagatgtgggttttcacattgtgtctctcacacagtaatacatggccgtgtcctcagatctcagactgcttagctccatgtaggctgtgctcatggatgtgtccctggttatggtgactctggcctggaacttctgtgcatagcttgtgctgccatcactagggcacaccaatcccatccactcaagcccttgtgcatggacctggtgcacccagtgcatacagtagctggtgatggtgtatccagaagccttgcaggagaccttcactgaggccccaggcttcttcacctcagccccagactgcaccagctgtacctgggactgggcacctgtggagaggacacaggagtggataaaaccctcttttactggacccagtcaccttagtcctggggactgagaattatcctacccgcagctatgaccaccaaaaacaggatcctccaattccagtccatggtaaggagctgtgctctcaggggcttctctagaggacatggctggttattgggtaatgctctcagggcacagacatatctgtagtgttcatctcaggtgatttgcatattcacgagaactactacttcatagccttacacttgatccagcatgagaaagagaaaatagatctcacatgaaccacacaactgtgggatgctgaggtacaagtcctcattcttatttaaagtcgtgtttccctttatatgcccagaactttgtgaagggagaacttctccactaagaaggtgactcacacaggacatggcacatggacagcctccaccctttcggggttttgctgtctgcagtcttactcttgggatctatgtgtcttctgaaatgtgtaccttttgatttaataaaaccatccctgttcttcattttttactaggaaaatacctcaaaccgctaacaattttgccttttaaatgtggttctcactgaattgttgatttatttatttctaaatgtatagagataatagaaatagtctttgcaaaattctaattttaacatgttataattttttggttttcaataaaacaacactcagttctcagagaaatccccgctgcagcctcatgtgcaccagctctggggctggagcctgttctgggtgggtcctgggcgccctctgcagcactgtctctgctctgcatggaggtttccatctgggctcacagaggatttatctctcagtgtttctagggctataggaagaggtcatgccctagtttaaaatgctccttcagtgacaccatatgttactgacacaatcttttgaaaacattgaccttagaagacccagtgaactctaagaaaccatcagggagcccttccctggagctcaggatgcatttaattagtggacacatagtgagcacaaaaattttgaagggttttgggggatgctctatcttgtttggtcttctgcaattgaatattacatctaagaatacctgtaggcatatatacttgtggatcaatgcccactccatgtcttctttttcaataacacacacacacacacacacacacacacacacacacagaactagttgatttgtacaacagtgggcctctaacttgccattttttctagtatcttgcaaatggggagcaccccctacatggatactagacctgagtatatgacttccttctccaaacagaagtaacgaaaacagtacacaattggagacgtagcaagtgtacattcatcatgtttgtatattttcacctgagaatactggagtttccctaagagaagtgactctgtgtccatcaagggttgagtgaccccgttcatcaagctgttggtgtcagaagcttccagttgctctactgtccttcactttttttctcccagtgtctttgcatttccctatgtttttctctgtatatagagtctctgctttgccacactcatcttcaatgtagattaattatgctgatgagaaggtaatgtgtgaggattgtatatattttcttttcttacaactataggatttttcattcagttaagaggtaaacagattaacattggaggctattccatttaactagcccaagttcctatttcactttatatatccctcccacactgccgtacgtctcgaagaaatgactgccagaagactttgcttctaaattcttagcaataactttcaatgaattgctttcaaataagttattcctaacttaaaattttattgtgttcaaagaaactcgtccttctaacaggcttccacatatgccgatagaacgttccaccactgacaggagggcagagtaccaatgattctaattacaggagctactccaaggaaagcctcagtgatatttgcgtttgagtccgtccattccattcgagtacattctattccattctattccattcgattccatttcatctgatttcattccggtccactccattgcattgcattccattccattccagtccattccattccattccattccatttcattctattccattccattccactcgagtccattccaaaccattccattcgagtcttttgcatatcattccattccattcgaattcattgcataccatttgagtccattccattcaattacattccattccattcgagttcattaaattcgattccattccactcgagtccattcgagtccaacccattccattcgattccattccattctatgccattcaagtccattccattgcattccattcgagtccattccattccactcgagtccattccattcaatttgtatccattccattcaatttgaatccaatgcattccattccattccattcgagtccattccattccactcgagtccattccattcaatttgtatccattccattccatttgaatccattgcattccattccattccatttgagtccattccattcgattccattagagaccattcccttccattccattcaattcgaaacctgtccattccattccattcgagtccattccgatccattccattcgagtccattccattccattgaactccattccattcgagtccattgagttccattccattccattcgagtcctttcaattccattccattcgagtccattccgatccattccattcgagtccattccgttccattgcactccattccattcgagtcctttgagttccattccattccattcgagtcctttcaattccattccattccattccattcaattccactcgattcgattccattacattacattcgagtccattacattccaatccaatccattctattcgattccattccattccatgccattcctttgcattctactcgagtcatttccattccattccattccattctaatccattccatttcattcgagtccataccattccattccaatcgagtccactccattccattccattcctttcgagctcattcaaatccactagtttcctttcgattccattccattccattcaactccatttcattccaatacattccattccattcgattccattccattccattacattccattcgattcaagtcaattcagttccattccattccatttgagtccattccactccattccattcgagtccattccaatccattccattccattcaagtccattccattctattccattcgagtccattccattgcgttccattctagtccattccattccattccatttcattcgtgtccattcagttctattgcatttgagtcgattccattccattccattcaaatccattcaattccattccattccattcctgtccattccattctattgaattcgagtccattccattccattctattcgagtccaatccattccattccattcaattcgagtccaatccattccattccattcaattcgagtcgattccattccattccattccattcgagttcattccattcaattccagtccattccatttcattccattccatttgagtccattccattctattcctttcgagtccattccattccattccattagggtccattccattaaattccattccattccactcaattacaaagcaatccactgcattcgggtccattccattccattcattccattgtggtccattccattcaattccatttgagtcaatttcattccattcctttggagtccattccattgcattccattccatcactttcgacaccattcaattccattccattcagtttgagtctatttaattccattacattcgagtccattcctttgcattccactccattcgagtacattccatggtattccatttgaatccattccattgcattaaattagattccattccattagtgtccattccattaaactcctttccattccattcgagtcaattccattccattcgtgtcagttccattccaataccttcgagtccattacattaaattccattcttttccattcaagtcaattccattccattccattcgggtcaattctaatccattgcactcaattccaatcgagtgcagtccatgccattcgagtaaattagatttcatttcattccattcgagtcccttctattccattccattccattcgagtcccttccattacattccattacattcgagtccattccattccattccattccattccattccattccattccactccattccattccatctggggccattccattcgagtccattccattgcattccataccattcgagtccattccattccattccattcaactcgagtcgattccattctatttcattccattcatgtccattccattccattcgaggccattccatttcattccattcgagtccattccattcctttccattccattccattgcattccttttgagtccattcaattcaatagcattccattcgagtccataacattccattccattccattccatttttccattccattacattccattccattcgattccattccttcccattcgagtccatttcattacattccactccattccatcctagtacatttctttctgttacattccattgcagtcaattccattgaattccatttcttggcattcgagtccattaaactccattccattcaagtccactccattctactccattattttcgagtccattccattcgaatccatttcatttcactccattattttcgagtccattccattctattctattcgagtccattccatgccattccattcgagtccatttcattccatccattctgttccttttaggtccattcaattccattgcattccgatcgagtccgttccgttccatgcaagtccattcgattccattctattccatttgagtccattccactctattactttcgagtcctttcccttccattccattctattcctttcaactccattccattgtatgaatttgtattccattccagtccattccattccattccagtccatgacatacgggtccatttcatttcattccattccattcgggtccatttcattccattccacaccattcttgtccattcaattttctccattccattcgattccattccattcgattccattcgagtcctttcaattccattgcactcgagtccattcaattccattccatgctattccattcgagtccaatactttacattccattccattcgagtaatttccattccattcgagtccattgccttcaattccattggagtcctctccattccattctattccatttgagtcctttccactccatatattctagtccattccattcaaaccccttccattggagtcaattccattccattccattccattctattccattcgagtccattcctttccattccattccattcgagaccgttccattccattggagtcaattccactccattccattggagtccattccattacattctattccaattgagtccattccattccattcctttcgagtccattccattctattcaaatccattccattccagcccattccattcgagtccattccattccattccattcgaatccattccattcgagtccattccattccattcaattcgagtcattagattccactccattccattccattcgagtccattccattccattccattccattccgttccgttccattccattccattccattccattccattccattccattccactcatgtccattcaattcaattccattcgagtcaattccattctattgcattcgagtccattccattctgttccattccattagattccagtccattccactcaattccattcgagatcattccaaaccattccattccataccattccattccattcctttccatttgggtccattccatttgagtccattccattccttctattccataacatttcattcgagtccatcccattcctttccattccactcgagtccattccattctaaaccattctattacagttcattccattcgagtccattccattcccctccattagagtccattccattagagtccactccagtaaaacccattcaattccattcgtgtctattccattccattccattctattaaagtccattccattccattcgagtccattccattccattccattcaataccattccattccaatccattctattccattcaagtcctttccattccattccattcaattctattcagatcaattccattgtttccattcgagtccattgcattccattcgagtccattgaattccattctattcgagtacattctattccatttcgttccattccagccctttccattcctttccgttcctttcatgtccattccattccattccactccattccattccattccactccattcaattccattccactccattccattcaattccattccattccattccattccattccattccattccattagagtcgtatcctttccatgccattccattagggtaaattccattctattccactcaattccattccattgcattccatttcatttgagtccactcctttccattccattcaactcgagtcgatttcatttcattccattccattcgagtccattccgttccattcgagtccattccattccattccattccatttaacttgagtcatttccattaaattccattcctttccagtccattccattccatttgactccattccattccattgcatttgagtccatttcatttcattccattccattccattccattcaattccattccattcgagtccattccattgcattccattccattcgagtccatacctttctattccatttgagtcaattccattccatgcctttcgactacattccattccactccattccattccattccactcgagactgttccaatccattccaatacatttgagtccattctattccattcgggtccattccattccattcgagtccaatctctctcatttcattccattcctttcaagtccattcaattccattccattccatttgagtccattccattccactccattccattccattccatttcactccattacattcgtgtccattccattcgagtccattccattccattcatgtcaactcaattccattccattccatacgttccattttatgccattccattcgaatgcattccattctattccattcaaatgaattccgttctattccattcgagtccattccattcctttccattcgagtctgttccattccgttcctttctattcctttcaagttcattcctttcaattccattccatttgaaggcattcccttccattcgagtccattcgaatcctttcccttctatttcatttgagccattccattccattccattagtgcccattccatccagttccattccactcgaacccatttcattctgttgaaatccattcaggtccaatcaattcaaatccattcgagtcaattccatttgagtccattccatagcattccattccgtttcactgaattccattccattcctatcgaatcaattgcattcaaattcattcgagtccattgcattctattccattcgagtccatccctttccattccattagggtccattccattaaattccattccaatccattcgagtccattccattccattctattccactccattccattccattccatccctttcgattccattgcattctattcgcgtccattccgttccattccattccattcgggtccattctattccattccatttgattccattccactccactgcatttcattcgagtacattccattccatttcattccattctatagaattccattcgactccattccattccattccattccatagtcaacttcatttccttacattccattccagttgagtccattcaattccattccattcgagtctattccactccattccacacaagtccattccattccacaccattccattcgagttcattccattcgattccaatccagtatattccattcaattccattcgattcaagtcgattcaaatccattccactgcattcaaatccattcgattccattccattccattccattccattctagtcaatttcattcctttacattccattccagtcgagtccattcaattccattccattcgagtctattccactccattccatacaagtccattccattccaaaccattccattcgagttcattccattctattacaatctagtagattccattcaattccattcgattcaaatccattcgaatccattccattgaattcaaatccattcaagtccattccattccattcctttcgagtccattccattgcattccattccattcttttcgagtccattcaattcgattccactcctttgaagtccattcaattccattccattccattcgaatccattccattccattccattcaaatgcgttccattccactacattccattcgaatctattctattccattccgttcgcatccattccattcgagtccattccattgcattccattccattcgagtacattccattcttttccatgcgagtccattactttctattccattccattagattccattccattaaattccattccattcctttcgagtccattccattcaaatccattccattccaatccattccattccattcccaacaagtccattccattccattccattccattccattccattccattccattccattctattccattcaagtccattccattccattccattccattccattccattccattccattccattctgttccatttcatttcattccattccagcacattccattccattcgagtccattccatttcattccattctattgctttcgagaccattcaattccattccatttcattcgagtcaatttcattcgattccattccattgcattccattccattggcgtccattccgttctatcccatttgagtccattcctttccattccattagattccattccattagagtccattacattaaattatattccattccattcgagtccattccattccaaaggagtatattccactccattgtctttgtatccattccattccattacattctattccattcatgtcgattccattccattccctttcattccattaaatttcattaccttacattacgttacattacattacattacattacattacattacattacattacattacattcgggtcctttctattccatttccttcgagtctattccattccattgcattccaatcaagtccattcaattccattccatttcattcgattccattccattgtattcccttcgaatccattgcattccattccattagagtccattccattaaatcacattctgttcctttcaagtccattccattccactccaacgtactcaagtcatttcaattccattcgagtccattcctttccattccattccattccactggattctattccattccattccattccattccattccattccattccattcgggtccattccatttcattcgattccactccgttcccttccattccattcgagtccatttcattccattccattcctttcagatctattcaattcaactacattccattcaaattcattccattccattccattccattccattccattccattccattcgatttgggtccattcgattccattccattcatgtccattctattccattcgagtccattccattccattaattttggtttcattccattccattccattcaattccgttagagtccattccattccattccataccattccattccattccatttcattccattccgtgccttgcaattccattcgattccattccattcgggtccattcaattccattccattagggtccattccattccattccactccattcgggtcaattccattccgttccattccattcgattccatttctttccattccattccattaaattcgggttaattcaattcccttccattcgagtccattccattccattccgttccattccattccattccactccactcgattccattccacttgaatcaattccattcgagtgaattcctttccattccattcgtgtacattccactccgttccattcaattagagtttattccatcccatcccatttgagtccacttaaatccatcccattccattcaagtccattccattttaatccattggagtccattccattgcattccattccattagaatccattccattatattacattcaagtccattccattctgttccattacaatcgtttccagtccattccattcgagtccattccatttcattccattcgagtaaattccatttcattccattccatttgagtcaattccattccattccgttgcattccattccattccattccattccactgcattccattcgtgtccattcctttcccttccattcgagtccattctacttcattccaatccattccattccatcccatttcattccatttgagtcaattccattccattccattgcattgcattccattccattccaatcaattccattcaattccattctattccatttgagtccattcaattgcattccattcgagtccattccattcctttcctttagagtccattccaataaatacaattctattccattcaagtctgttctattccattccattccatttgtatccattctatttcactcgagcccattgcattccattccattcgaggccattccattccattccttactattccattcaagtccattccatccaattccattgcattccattccattccattcaattcctttccattccattccattccttttccattccattccattccattccattccattccattccattccactacattccgtttgaatccattccattccattccgttcgagtccattccattggaatccattccattgcattccattccattcgagtccattccattcttttccatttgagtccattacattcgattccattccattagactacattccattaaattccattccattcctttcgagtccatttgattccattcaaatccattccattccattcccatcaattccattccattccattccattctattcaattctagtccattccattccatttcattacattccgttcctgtacattctattgcattttagtccattccatttcattccattctattcctttcgagaccattctattccattccatttcattccagtccattccattcgattccattccattgccttccattccattggcgtccattccattctatggcattcgagtccattccattacgttccattagagtccatttcattaaattacattgtattccgttcgagtccattctattcaatttcattccattcgtgtccattccattccactcgaatccattccattccgttacttttgagtccattctactccatccaattctattccaatcaagaccattagattcccttccattccattgaagtccattccactccattccattctagttcgttacattccactccattccattcgagtccattcctttctactccattcgagtccattccattatattccattccattccattccgttctattctgttcgagtctgttccattcccttccgtttgagtccactcaattcctttcgattccattccattccattgcattcaaatccattgaattccatgctattccatttgattccattccattccattccattagagtccctttcattcaaagcaattccattccattccattccattccattccattccattccattccattccattccattcgtctcctttccataccattccgttccatttgagatcattccattccattccattccattcgggtccattccattcaatgccgttcgtgtcaattccactcaattaggtacgagtccattccattgcattccattccatcgagtcattgcattccattccattcgagtccattccattgcattccattccattcctttcgagtccattcaattccattaaattccattcgaatacattacattctaatccattcgggtctcttccattcgaatccattccattgcattccattccattcaagtcgattccattctattccattcgagtccgttccattacattacattcctttaaattccattccattaaattccattcctttccttttgagtccattccattccattcaaatgcaatccattccattcccattgagtccattccattccattccattcaattccattccattccattccattccattccattctattccattcaagtccattcctttccatttcattccagtccattccattccattccattccagtccattccattccatttcattcgagtccattccactgcattacattccattcctttagataccattcaattccattccatttcatttgagttcattccatttcattccattccattgacatcctttcctttctattccattcgattcaattccattccattccattagagtccattccattaaattccattggattccattcgagtctattctattccatttttttattcatgtccattccattccactcaattccattgcattccattacttttgtgtccattccattccattcaattcttttccaatcaagtccattagattcctttccattccattcaagtccattccactccattccattctagtccatttcattccactccattccatacgagtcccttccattctactccttttggttccattccattccattgtattccatttgacaccattccattcccttccattctgtttgagcgcactccattcctttcaattccattccattccatggcattcgaatccattcaattccatgctattccatttgagtccattccattccattccattagagttcctttcattcaaagcaattccattccagtccattccgttccattactttccatcccattccattcgtctccattccataccattccattccatttgagctcattccatcccattccaatccattcgtgtccattccattcaattgctttccagtcaattccattcaatgccatacacgtctattccgttgcattccattccatcgagccctttgcataccattcaattcgaatccattccattgcattcctttccattcctttcgattcctttcaattcctttccattccattctaatacattacattctattccattcgagtccattccattcgaatccatttcattgcattccattccatttgagtccattccatactattccattcgagtccattccattaggttcatttcctttagattccattccactcctttcgagtccattccattccattcaaattcattccattccattcccatccagtccatttcattccattccattctattccattcaagtccattcctttccatctcattacattccaatgaagtccattccattccattgcattccagtccactccattccattccattcgagtccattccattgcattcaattccattgtcatccattgcattctattccattcgagtccattccattgcattccattccattgtcatccattgccttctattccattagagtccattccattgcattccattccattcctttcgagtcctttcaattccattaaattccattcaaatacattacattctaatccattcgagtccattccattcgaatccattctattgcattccattccattcaagtccattccattctattccattcgagtccattccattacattccattcctttagattccattcaattaaattccattccattccttttgattccattccattccattcaaatccattccattccaatcccttcgagtccattccattacattacattctattccattcaagtccattccattacatttcattccattccattccattccattcgagtccattccattgcattccattccattcctttcgagaacattcaattccattccatttcaattgagtccattccattgcattccattccattgacatccattccattgtattccatttgagtccattccattaaattccatagtattccattcgagtccattctattccatttttttccattcatgtccattccattccacttgagtccattgcattccattacttttgagtccattccattccattcaattcttttccaatcaagtccactagattccattctattccattcaagtccattccactccattccactctagtccgttacattcctctccattccataaaagtccattccattctactcctttcgattccattccattccattctattccatttgagtccattccattccattccattagagttcctttcattcaaagcaattccattccagtccattccgttccattactttccatcccattccatttgtctccattccataccaattcattccatttgagctcattccattccattccattcggtccattccactgaattgctttccagtcaattccattcaattccatacacatccattccgttgcattccattccatcgagtccatagcataccattccattcgagtccattccattacattccattccattcctttcgcttcctttcaattcttttccattccattctaatacattacattctattccattcgagtccattccattcaaatccatttcattgcattccattccattcgagtccattccatattattcagttcgagtccattccattagattccattcctttagatttcattccactccttttgaatccattccatttcattcccatcgagtccatttcattccattccattctattccattcaagtccattactttccatttcattacattccaatcaagtccattccattacattccattgcactccattccattccattcgtgtccattccattgcattccattccgttcctttcgagtccattcaattccattaaattccattcgaatacattacattctaatccattcgagtccattccattcgaatccattccattgcattccattccattcaagtccattccattctattccattcgagtccattccattacattccatttttttagattccattcctttaaattccattccattccttttgagtccattccattccattcaaatccattccattccattcccatcaagtccattccattccattctattccattcaagtcccttccattccatttcattacattccattccagtccattccattccatttcattcgagtccattccattacattccattccattgctttctagaccattcaattgcattccttttcattcaaatccattccattcgagtccattccattgcattccattccattgacatccattgcattctattccattcgagtccattccattagagtccattccattaaattccattgtattccattcgagtccataccattccatttttttttccattcgtgtccattccattccatttgagtccattgcattccattacttttgagtccattccattccattcaattcttttccaatcaagtccattagattccattccattccattcaagtccattgcactccattccattctagtctgttacattccactctattccatacgagtccattccattctactcctttcgattccattccattccattctattccatttggtccattccattacattctattctgcttgagtccactccattcctttcaattccattccattccttggcatttgaatccatcctattccatgctattccatttgagtcattccattccattccgttagagtccgtttcattcaaagcaattccatttctgtccattcttttccattccattccatctcattccattcatctccattccataccattccattccatatgagctcattccattccattcctttcggatccatttcattcaattgctttccagtcaattccattcaattccatacacgtccactccgttgcattccattccattgagtccattgcataccattccattcgagtccattccattgcattccattccattcctttcacttcctttcaattcctttccattccattctaatacattactttgtattccattcgagtccattccattcgaatccatttcattgcattccattccattcgagtccattccatactattcaatttgagtccattctatttgattccactccttttgagtccattccattccattcaaatccattccattccattctcatcgagtccttttcattccattccattctattccattcaagtccattccattccatttcattacattccaatcaagtccattccattccattccattccagtccattccattccattgcattcgtgtccattccattgcattccattccattccatttgagaccattcaattccattccattccattcgagtccattccattgcattccattcgactccttttgagactattcgattccattccatttcattcgagtccattccatttgagtccattccattgcattccattccattgtcatccactccattctattccattcgagtccattccattccattaaattagagtccattccattaaattccattgtattccatttgagtccattctattcaattcctttccattcctgtccattccattccactcgagtccattccattccattacttttgagtccatttcattccattcaattcttttccacacaagtccattggattccattccatttcattcaagtccattccactccattccattctagtccgttacattccagtccatttcaatgcagtccattccattcttctccattcaagtctattccattccattccattcgaatccattccattccattccattccattccattccattccattccattccattcctttccgtttgagcgcactctattcctttcgattccattccattccattgaatttgaatccattcaattccgtgtgattccatttgattccattccattccattccattagagttccttccattcaaagcaattccattccattccattccattccattcatctccattccataccattacattccgcttgagctcattccattccattccattcgagtccattccattgcattccattccattcgagtccattgtagtccattccattcgagtcccttccattgcattccattccattccattcgagtccattccgttccattctatttcatttcattccattccattccattccaatgcattctattctattccatttggatccaatccattgcatgctattccattgcattccaagcatttgagtcctttccattccatgctgttccttttgagtccattccattccattccaatcaagacgattcaattcgagtccattccattaaaatccattcgaatccattccattccattccataacattcgagtccattcaattccattccattcgagtccattcctttccattacattacactaatttccaatccattcaattccattcgagtccattccattccattccattcgagtccattccattgcttttcattccaatgccttcgaatccattccattccattccattccattccattccattccattccattctagtccattcaaatcctttaaatttgaatccattacattgcatagcattccactctagtccagtccacttcattccatccaagtccacaccatttcattccgttagagtccattccatttaattccgttgtattccattcgagtccattccattcaattcctttccattctattcgagtccattccattccattccattccattccattccattcgagtccattccattccattccattccattccattccattccattccattccattccattcaggtccattctattccattccattcgagtccattccaatccatttctttcaagccattccattccacaccattccatttgagtccattacattctattccactcgagtccattccactcaattccatttgagtccgttccattgcattccattccattagagtctattccattccattcaatttgtgtccgttccattccattccattccatttttttattccattcaattccattccattcctttccagtccaggtcattgcattccattcgagtcttttccactccattccaatccattccattcctttcgagtccattccattccattcgactccattccattccattgcatttcattctttcgagtacattccattacattcctttcgagtccattccattagattccattactttagattccattccaataaattccatcctgttccttttggagtccattccattccattcaaatccattgcattccattcctttcgagtccattccattgcattcctttctagtccattccattagattccattactttagattccattccaataaattccgtcctattccttttggagtccattccattccattcaaatccattgcattccattcccttcgagtccatgcaattccatttcattctattccatttaggtccatttcattgcatttcattccattccattccattccattccattccattccattccattccattccattccattcaattcctttccattccattcgggtccattccattccattcaagtccatttgagtccattccattccatttcattcgattccatttgattccaaaccatttcattcgagtccattccattctattccattcgaatccattccattccattcgagtccattccattccattccgttcgaatccattccattcctttccattccattcgagtatattccactccattcaattccattccattccatatcattccattctattctggtccattcctttcaattccattagagtcaattccattgcattccattcgagttcattccttcacattccattccattcgagtgtattccaatccattccatttgagtgtattccattgcattccattccattcttttagagtccattcaattctgttccattcctttcgagtccattccattccattccattccattccattccattccattccattccattccatctgggtccattccattctattggcgtccattccattggcgtccattccatgacattcgtgtccattccaatccattccattccactcggttccactccattccattctattcgagtccattccattccattccattccattcgagtccattccattacattctattccatttgcgtctattccattccattccattcgagtccattcctttcaattcgagtccattccattccattccattcgagtacgttccattcaagtccaatccattccattccttttgattccattcaatacaattgcattccattcgagtccattccattgcattccattcaattcaaatcctctccattccatttgggtccattccatcccattccattccattcgagtccatttcattccattccattccataccattcgaatccattccattccgttactttccattccattcgagtccattccattccagtccataccagtcgagtccatcccattctattccatttgagtccattgcattccattccattcgagtccatccattccattccattcgagtccatccattccattccattcgagtccatcccattccattctgttccgtttgagtcgattgcattccattccattcgagtcctttccattccaacccattcgagtccatttcattccaatcccttccattcgaatccattccattctattccattcgagtccatgccattcgattccgttcgagtccattcctttacattccattcgattcccgtccattccgttccatttcattccattcgagtccgttccatttcattcattgcattccttttcggtccattccattccattctagtccattccattccattgaattccacttgagtagtttcccttctatttcagtcaattctattccactccactccattcaagtccattccatttctttccattcgagcacaatccattccattccattgcaatccattccattccttttgagtccattccattccattccattccattccattccattcctttcgagtcctgtcaattccattccattcaattcgagtccattccattccattccattccactcgagtccagtccattccattccattcctttcgagtcctgtcaattccattccattccattcgagtccattccattccacttgagtctgttccattccattccattccattccattccattccattccgtttcattccatttcattccattccattcgagtccattccataccatgacattccgttgtattctagtccattcaattccattccattccaatgcattccattcgagtccattccattccattccttttgggtccattcttttctattccattcgagtcaattcctttccattccattagagtccattccattctattccattccactcgagtcaatttaattccgttatattccattcgagtccattacattcctttccattctagtccattcctttccattccattccattccactagtgtcgtttccataccattccattccattcgatttctttcccttcctttcgagtacattccattgcattccatttgagttcattccattccatttcattcgattccattccactccattccattcaattcgagtctgttccattccattccattccattcgggtccatacatttcaataccatttgagtcaattccattccattccattggagtccaagccattgcattccaatccattcgattccattctgttccattccattgcattccattccattcttttcgagtccattcagttccattccattactttcgagtccattcagttccattccattactttcgagttcattatattcctttccattcgattccattccatttcattccattccattcttttcaagtccattcaattccattccattacaatcgagtccattccattccagtccattagattccattccattaaattacactgaattccgttcaattattttccattccattcgtgtaccttccattgcattcgagtccattccattcccttccttttgaatccattcctttccataacattctattccattaaagtccattccattccataccattcaattccattccaatccattgaattccactccattccattcgtgtccattccattccattccttttgtggacattccattccattccaatccattgaattccactccattccattcgtgtccattccattccattccttttgtggacattccattccattccaatcatttccaatccattccattccagttctttccattcttttccagtcgactccattccattccattccattgcattccatttcattccttttgtgtcctttccattccatttcattccatgcgagtacattccattccattcaattcgaggccattccattccaatcgactcgtttccatatcattccataccacttgagtccattccattccattcgagtccaatccattcaattacattcgtatccattgcattccattccagtacattccattccatttatttcatgtacattcgaatcctttccattccattcgagtccattgcattctatttcattcaagtgcattaaattccttttcattagaataaattccattagagtccattgcattaaattccattccattgctttcgaggccataccattcatttggcgtccattgaattccattccattcgagtccattccattccattccattccattccattccattccattcctgttggttccattccactccattgcattccattccattccattagtgtactttccattccattccattggggtccaatccattccattccagtccactcgagtcatttccattccattccattccattggagtccattgtattcctttcgaatccattccattccattccattccattcgagtccattccattccattccattcgagtccattccattccattcctttcatttcaagtcccttcgcttcctttccattccattcaagtccattccattctattccatttgggtccattaaattccacttcattagagtccattcccttaaattccattcaattgcattcgaggacattccacacaattcaagtccattcctttccattgccttcgagtccattccattccaatccgtaatattccattcaagtccattccattccaatcctttccattccattcaattccattctattaaattgcattcccttccattccattcaatactgttccattccattccattccattctggtccgtttaattccatttgagtactttccattccattcgattcaagtccattccattgcattccattccattcctttcatctccattgaattccattatattccattctagtccattccattcgattcctttctagtccattccattccattccattcaattcgtgtccacaccattatattccactccattcgaatccattccattctattccattccagtccattccatgccattccattagaatgcattcattaaatgtcactcccttcctttggaggccattccattccatttgagtccattctattccattccactccattcgtgtccattccattccatttgagtccattccattcgagtcctttcctttccattccattccattccattcctgttgattccattccattccattccattccattccattccattccattccattccgttccttcccattccatttgagtccattccattccatttccttcaattctattccattggcgtccattccatgacattcgtgtccattccaatccattccattccactcggttccattccattccattctattcgagtccattccattccattccattcgagtccattccattacattctattccatttgagtctattccattccattccattcgagtccattcctttcaattagaatccattccattccattccattcgagtacgttccattcaagtctaatccattccattcctttcaattccattcaatacaattgcattcctttcgagtccattccattccattgcattccattcaattcaaatcttctccattccatttgggtccattccatcccattccattccattcgagtccattccattcctttactttccattccatttgagtccattccattccagtccataccagtcgagtccatcccattctattccattcgagtccattgcattccattcgattcgagtccattccattccattctgttccgtttgagtcgattgcattccattccattcgagtcctttccattccaacccattcgagtccatttcgttccaatcccttccattcgattccattccattctattccattcaattccattccattcatttccattcgagtccattccatttcattccattctattcctatcgagtccattccattccattccactgcattcgagtccattccattccattcgagtccattccattccattctattccatttcagtccattccattccattcgagtccattccattccattccattccattccattccattgaattccattctattccgtttgagtctgtcccctgccattcaattcaattccagtcaattccattccatttgagtcaattccaatgcattcctttcctttcaggaccattcctttccaatccattcgagtcccttcctttgaataacattgcttcctttcgagttcattccaatccattccattcgagtccactccgttatattcctttccattcgagtccattccattctcttacattcgagtccattccattccaatcctttagtgttcattccattaaattccactctattccatacgggtcaaatccattccattccattccattccattccattccattctgttccattgaagttcattccattcaataccattccattccattccattccattccattccattccattccattccattccattccatttgggtccattttattccattctcttcgagtccattccattcaattccattctgctcgattccagtcaattccattccattgcatttgagtccataccattcaattccattccatttcattcgggtccattccattccgtcccatttgagtccattccattccattccattccattccactcaattcgttacaattctaatccattacattccattctagtccattcctttccattcgtgttaattccattccataatattcgagtccatcccattacattcgagtccatcccattcctttctattcccttcccttccattccattgctttcaggtcctttccattccgtagaattccattcgagtccattccaatccattccattgtgttcctttctagtccattccattctattccattccattcgggtacaatccatcccattccattcgaggacattccattccattccactcaattggagtcaattccattcatttccattccacttgagtcgattccattccattcatttctttcaagtccattccattccatttgagtccattccattccattgcattccattcgagtccattccattcattccattctattccattccaatccattctatttcatttcaatccaatccattccattccattcgaggccattccattccaaccatttcgagtccattccattccaacccattcgagtccattccactacactgcattccactcgtttccattccattctatttcactggagttcattccattcccacccattccattcggttcatgtccattccatttcattccatttcattcgagtgctctccattccattccattcctctcgagtcgattacactccattccataccattcgagtccattctattccattcaaatccattccattccatttgatagcattccattccattccattccattccattccattccattccattccattccatttcataccattcctttcaactgcattcctttcgagtccattcctttccattccattcgagtctattccattccattctattacattcccgtccattaaattaattccattccattcatttcgagtccatttaattccattccattactttcgattccattcctttcgattccattccattctattccattcgagtgcatttcattgcattccattccattcattttgagtccattccattccattccattactttcatttccattccaatccattccattcgtgtccattccattaaatttcattgtattccattccattccattcatgtccattctattcgagtccattcgattccattcagtactattcctttcgagtccattccattccaatcctttcttttccattcaagtccattccattccgtttcattccattccattccattccattcctttccattccattccattccattccaatcctttccgctcggctaaattcctttccatgccattcgagtccattccatggcatttgagtccattccattcgagtccattccattccactccattccatttgattccattccattctattccattcgattgctttccaatacattacattctagtacattcctttccattccgttttagtccattacagtccattccatttctttccattccattccattgggaccattccatacaattccattcgagtgtattccattccattacattccagtccatgccattctattccatttgagtcctttccatttcattcccttccatttctttcaggtccatttcttttctttccaatcaattccattccattccattcaagtccattcctttacattccattccactcaagtcattttcattccattccattccattcaagtgcattccattccattccattccattcaagtgcattccattccattccattccattccattccattccattgcattccattccttttgagtcccttcgatgccattccattccagtcgagtccattccattccattcgcatccattccattaaattcgagtccattccattcgagtccattccattccactccattccattagagtccattccattacttttgagtccattcaatgcaattccttaccattcatgtacattccatttaaattccattccattccattccatacctttcctttccattccattccattctattccaatacattccattccattccattccattccattctattcgagtacattccattcccttccattccaatggagtccattccattctattccatttgagtccattctattctattccattggagtccattccattctattccactcgagtgcatttcattacattccattccattcgagttcatcccattccattgaattcgagtccaatcccttccagtccattcaattccactacgtaccatttgattccattccattccatacttgtccattccattccactctagtacttttcattccattgcattttattccattcgagtccatcccattccattccattcgagtctattccactccattcgagtccatttcattgcattccattccagtccattccattccatactcttccatttgagtacattccattccattccattcgagttcattccattccaacccatttttttcgactccattccatttcattcctttcgaatccattccattccattccattccattcgagtccatgccactccactccattccattcgagaccattccattccattccattaatttccattcttgtccattccattcaattccattcgagtcaattctattccattccattcgagtccattccattgcattccattccattctagtccattccattgcattccattccatttcagtccattccactctattccattcgagtcctttccattgcattccattagattccattacattaaatactattgtattccattcgagtccattccattccattccatttgtgtccattccattccatttgagtccgtttcatgctattccttttgagtccattccattcaaatccattctattccattcaagtccattccattccattccattccattgggaccattcccctccattccattccagtccaatccattacactccattccactcccctcccttctattccattcgaatcctttccattccattcccttccatttcattcaggtacattacattcctttccattcaaattcattccattccattctattcgagtccattccatttcattccattccactcgagtcattttcattcctttccatcccattcgagtccattccattccattccattccattcccttccattccatttgagtccatacgattccattccattccactcgagtccattccattccattccattcgagtccaatccattcgataccattccattcccttccattccattcgattccaatcgattgtattccattcaagtccatgccattcttgtatattccattccattacgttctattccatttgagtccattccattccattctattccattccattccattccattccattccattctaatctatttcattcgagtccattctatttcattccattccagtccattccattccattctattccatttgagtctattccattccattccattcgaatacattccataccaacgcgtttcattcgagtccattccaatcccttgtattcgagtccattgcattccattcccttccattccattccattccattccattccattcgagtaaattccattctttccattccattctagaccattaccttccattcgagtccattccatgccattccattccattccattccattccattccatttgtttccattccattccattccattccatttgagtccatcttattcgtctacattccattccattcgagtccattcaattctattccattccatttgagtccattccaatacattcccattcgagtccattgcattcctctccattccattcgagtccattccattttattccatttgagtcgttgctattccattccattcgagtgcattccattctgttcccttagagtctattccattccattccattccgttcaagtctcttccattccattcgagtccattccattccattgcattcgagtccaatccattccatgctattcttttgagtcctttccattggagaccattcctttccaacccattccattcaggtccattccattccattccattcgaatccattccattccattccattccattccattccattccattccggtccaatccattcaattacatttgcatcaattccatttaattccattcaagtccattccgttacaatccactccattcgagtccagtccattttattgaattcgagtgcactccattccattccattacaatgcattccatgaaactctgttgtattccttttgaatccatttcattccattcaattcaattcgagccctttccattccattccatcccattcatgtgcattctattccataccttttgagtccattctactcctttccatttcattcgagtccattccattccattccattccattaaattcgagtacattccattccattcctttcaagtccatttcattgcattatattacattccaatagagtccattcaattccattccatttgagtccattcaactccattccattcgagtccattccattccacaccattccatttgagtccattacattgtatgccattcgagcccattccattcaattccattagagtcacttccattccattcctttccagtcttttccattgcattccattgcattctattcccttcgattccattcctttctgttccattggattccattcaattggagtcctttcccttaagttccattccattccatttgagtccattccattccattcctttcgagtccattccattccattccattctattccattcaagtcctttccattcgacattattacattccattcctgtccattccattccattcgggtacattccattccattccattcgagtccattccattccattccactccactccattacattctactccattcgaatcccttccattccattcctttccattcctttcatgtccattccatcccattccattcgagcccatttctttccattccattccagtccatttctttcaattccattccattacattacattcgtgcccatattattccattccattccactcacttcttttcaattccattccactactttcgagtccattccattccatctgagtccattccattccattattttcgataccataccattaaattccgttccattcctttcaagtccattagactccattccattccattcgtgtgcattccattccattcgagtccattccatcccattccttttgagtccattccattccattccattctattccattcaagtcctttccattccacattattgcattccattcctgtccattccattccattcgggtacattccattccattccattcgagtccattccattccattccactccactccattacattctactccattcgaatcctttccattccattcctttccattcctttcgggtccattccattccataacattcgataccatttctttccattccattccattcaattacattcatgcccatactattcctttccattcctctgacttcttttcaattccattccattacttttgagtccattccattccatgattttcgacaccataccattaaattcctttccattcctttcgagtccattagattccattccagttcattccattgcattctcttccattccattccatttcattcgagtgcctccattccattctattccattcgactccatttcattccattcattccattctattctagtccattccataacattacgttccatttgattcaagtccaatcaattccattccatttcgtttgattcctttccactgcattccatttgaatccattccattgcattgcatttgagtcctttctgtttattccattcgaggcaattccattccaatccattcgggtccattcctttccattccattgcactcaaatcgattagattccattccaatccattcgggtccattcctttacattccattgcactcgaatcgattagattccattccattccattcgggtccattccattccaatccattccattcgaatccattccattccagtccattccattagggtgcattccattctattccctttgagtcaattccattcaattccattcaagtccaatcctttgcattccatttcattcctttcgagaccattcaattccattccatttcattcaaatccattccattccattactttcgtgtccattccattccattccattcgagtccattccattctattcagttcgattccattccattccattccattagattccattccattagagtccgttcaattaaattccattccattccattcgagtctattccattccattcgagtccattccactgcattctgttcgtgtccgttccattccattccattctcttccattcaagtccattgcattccattccattccattccattccattccattcaagtacattccattccgttccattccattcaagtacattccattccattccattcccatccattccaattgggtccgtttccttccattttattctagtccattccattctattcttgtaccttacattccattccattcgagcccattccattccactcaattcctttcgattccattcaattctattccattcgagtccatttccttccattcccttcgagtccgttctgttccattcctttctattccaggcaagtccattccactccatttcattccattccattccagtacattccaatacattccattccatttcattcgggtccattcatttccattcctttcaagtccattccattccattccattaggatccattcctttccattccattcgagtccattgcattgcattcgtgtccgttgcattcgagtccattccattctactccattcttttcgggtccattccattccagcccattccactcgagtccattccattcctttccatatttcactcgagttgattccattccattccattcgagtacattccattccattccattccattccttttgaatccattcaattcaattgcattccattcgagtccattcaatttcactccattccattgcattccgtttcattccattccattgcattccatttcatgccattccattccattcctttcgagtccatttcattccattccaatccattccattcaattcgagtccatatcattccagtacattcctttccattcgagtccattcaaatcggctacattccattccattcgagtccattcaattcattgttggtgggactgtaaactagttcaaccattgtggaagtcagtgtggcgattcctcagggatctagaactagaaataccatttgacccagccatcccattactgggtatatacccaaaggactataaatcatgctgctataaagacacatgcacacgtatgtttattgcggcattattcacaatagcaaagacttggaaccaacccaaatgtccaacagtgatagactggatcaagaaaatgtggcacatatacaccatggaatactatgcagccataaaaaatgatgagttcatgtcctttgtagggacgtggatgaaattggaaatcatcattctcagtaaactatcgcaagaacagaaaaccaaacaccgcatattctcactcataggtgggaattgaacaatgagatcacatggacacaggaaggggaatatcacactctggggactgttgtggggtggggggaggggggaggaatagcatcgggatatatacttaatgctagatgatgagttactgggtgcagtgcaccagcatggcacatgtatacatatgtaactaacctgcacaatgagcacatgtaccctaaaacttaaagtataataaaaaataaaacaaaataaaaaaaagaaaaaaaattccattccatttcattcgaatcctttagactccattccatttgactccattccatttcattccatgcgaatccattccattccattctattccattctattttattcgagtccattccattccattccattccattccattcgagaccattacaatccattctattccttttgaatccattctattccattccattcgcgtccattccattcgagtccattccattccattcgtgtccattaaattccattacattgcatttgaatccattccagtccattccattccactccattagactacataccattcctttccattccattccattcgagtcaattccattgcaatccattcggggccattccattgcattccattcgagtccattccattccattccattccattacattctattagactccattccattccagtcgagtcaattctattccattccattctagtctattccattgcattccattcgtgtccattccattccattcgagtccattccattacattctattcgagtgcattccattccattctattccattccattccagcccattccactagtgtccattccattctattacatattccattgcactcgagttgactccattccattccattccattcgagggcattccgttccatgcgaatccattgtattctattcaactctagtccctccattccattccattccattcgagtccattgcattccatccgttcctttccatttgagtccattccattccagtccattctattccagtccattccacccgagtccattccgttacattccgtattccattccactcgaattgattccattccattcattccattcgagggcactcccttcaattcgagtccattccattccattccagttgagtccattctattcgattccattccattccttgccattcaattcctttcgagtccattcaattcaattgcattccattcgagtccattcaaatacattacataaaattccaatccattccatttcattccattccattccatttgagtccatttcattccattacatttcattccattctagtccattccaatcggttcattccactccatttgagtccattcaattccatcctttttattcgaatccattccactccactcctttcgagtccattccattctactccattccattcgactccattccatttcattccattcgaggacattccattccattccattctattcgattcgattccattccattctatttgagtccattccatttcattcaagtccattccattcctttccattagagtccattccaatccattctattccttttgaatcctccattccattccattccattcgagtccgttccactcgtgtacattccattccctttgtgtccaatcaaatccattatatttcattcgagtccattccattccattccattcgagtccattccattccattccaattcattccattctgtccattccattcaattccattcgagtcaattccattaaattccattgtatcccattagattccattccattccattactttccattcgagtccattacattcaattctattcgagtacattgcatgccatttgagtccgttccattccattaaattccagtcgagtccattcaattccattccactcaggtccattccattccaatccattccattccattccattccattccattccattccattccatcccatcccactgcatttgattcctttccgttacgttcttttccattcatttcagttccattatattcgattccgttcgagtccattccattccattcaattccaatcgattccatttcattccattccattcgagtccattccattacgttccattagagtccattccattccattcgattccattccattcgaatccatcccattcgagcccattccactccattccattcgagttcgttccattccattccattccattctattccattatattccactccattacatttgagtccattccattccattcgagtgcattctattcaaatccattctagtccattaaattccaatcaattccattcgagtccattccattccattcgggtgcattccattccattccattcgagtccattccatcgcatttcattccattccttatgagtccattaaattacattgcattcaattcaagtccattccattctattccattagattccattccgttccactccactcgattcagggcaattccatgccattccattccattccattccattccattccattccattccattccattgcattcgagtccattccattccattccaatccattcgagaccaataaattccattccattccattccattccattccattccattccattccattccattcttttcgagtccattctaatccattcaagtcaattccatttcattccattccattccattccattccattccaaactgttctatgccatgccattccatttgactgcattccattccattccattcgagtccattccaattcattccattacattagtttccattccattctattgaatttgtgtcctttccctcccattgcattcgagtccattccattccatttctttccattccattccattccatttcattccattggagaccattccattccattcgagtccattccatacctttccatttcattcgaatccattgtattccattccattctgttcgagtccattcctttccattccattccattcctttcgactccattctattccattaccttccattccattagagttcattccactccaatccattccattcgagtccattccattcttttcattccattccattccatttgagtgcattccatttcactggagtccattccattccattctattccattcgatacctttcctttccattcgagtccattccattccattcagttcgagtccattactttctattacattacattgcattacatttgagtgtattcctttccattacattccattccatctgtgttcattccattccattccattcaagttcattccattccattcaatttcattccattccattccactttattcaacttccccccattccattccattccattcgtctccatttcattgcattccattccattcgaatccattccattccattcaattccatgcgagtctattcaattccgttgcatttcattccattcaattaggctccattcctttccatttcattccattcgcgtccattacattccattcctatggagtccattactttccattctattcaggtccattccattccattccaatccattccattgcattcgagtgcattccattccattccattgcatttgagtccattcaattccatttcattcatatccgttccattacattccattcttttcgagtccattccattccattcaatttcattcgagtctattccattacattccattggagtccaatccattcctttccattcctttcgattccattccattccattcgagtccattccattccaatccattccagtccatttgattgcattccattccattttttcgagtgcgttcaattccattccattccattcgaatactttcttttccattccattcaagaacttgccattgcatgccattccattcaagtccatcccattccattccattcaagtccatcccattcaattttatccattcgagtccattccattccactccattcctttggagtccattccattccattctactgcattccattccaatccattcgagtcaattccgtcgtattccattcctttccttttgagtccattcaattcccttccaatccatttgagtccactttattccattccagtccattcaagtccattccttttcattccattccattcaagtccattaaattccattccattccattccattcgagtccattaaattgcactccattccatttgagtcaattccattgcatttgactaaattccattcattccctttgagttcattccattccattccattcgagaccattctattccattccattcgagtccattgcattatactccatttgattcaagtccattcaattctattccattccagtcgaatgcattccactccattccattcgagtccattcccttccattgtattcaagtcattccattccattctattcaggtccattccattccattccattccatttaatcccattccattccactgcattccagaacattccattccattccattgcattccaataaattcctttccattcctttccattccattgcattcgagtccatgccattcctttccattcatgtccattccattccgttctgctcaagtccattccattccattcaattccaatcgagtccattccattcgagtccgttccattccattcaattcctttctagtccattccattccatttgagtccattccattccaatgcattccagtgcactgcattgcattccattccattctttcgagaccattcaaatccattccattcaattcaggtcctctccattccatttcattcaaggtctttccattgcatatcattccattcgagtacattatattatattccattcgagtccataccatcccattccattccattcaggtccgttccattcgagttcattcccttcgaatccattccattcacttcgattgcattccattccatttcattcgagtcctttccatcgtatctcattcctttcctttcgggtccattcaattccattccaaaccattcgagtcatttccattccattccaatacatttgagtccattccattccatacgaatccattaatttgcattccactccattcgtgtccattccattcaattcaattcgagtccattccattccattccattcaagtccattccattcaattccattcttttccattcaagtccattccatttcattccattccattcgagttcattccattgcatttgagtaatttccgttccatttgagtccattccattccgttcgagtccattcttttccattccattatgttctactcatttccatgccattccattccagtcgagtccatttcattcctttccattctattcaattccgttccataccgttcgagtccattccactccactcccctcgagtccattggattccattccattccacctgagtccattccattccacctgtgtgcagtccattccattccattcgagtccagtccattccattcgagtccattccatttaattccatttgattccattccattccattccattccattccattccattatatttctttcaagtaaattcaattcaattgcattccgtttgaggccattccattccattccgttgagtccattcctttccattccattaacttcgagttcattccattccattccattccattcaatttgaatccattcaatttcattccattccattccattcgtgtccattctattccattccattccactcgagttcattccattccaatcctttcgagtccaatccattccattccattccattccattcttttcaagtccatgccactccatttctttcgagtccattccattccactccattccatttgagtccattgcattctattccattcgagtccatacatttccattccatttaggtccattcccttccattctattccattccagtccattccattcaattgcattgcattcctgtccaatctattccatttgggtccattccattccattccattcgagtccattgcattccattatattccatttgattcctttccattcaagtgcattcctttccaaaccattcaattcgaatccattccattccattccattcaagtccattcctttcaattccgttccattcgagtccatatctttccattccatactatttgagtccattccattccattccattccatacgggtccatacccttcaattccattcgagtgaattcgattccatttcatttgattctattccattgaattcaattccatcacattcgagaccattcaattccgttacattcctttcgagcccattccattccattccattcgagtttattccattgcatttcattcccttcgagtatattcctttacattccattcgagtcaattccattccattcaactggtctccattccattagaatccatttcattaaattccattccattcattcgagtccattcccctccatttcagtccactcaattccattccatttcagtccattccattcctttgtattccattcgaatccattcctttccattccagtccattccattccattccagtccattgcattccattccattccagtcttttccattccattcgggtccattgcattcctttcaatttgagtccatttaattgcattccattccattcgattcgagcccaatccattccattccattcctttcaggttcattcctttccattccattccattcgagttcattccgttccgttacattccattcctttcgagtccattccattccattccattccattcaagtgcagtccaatccattctgttcgactccattccattccattcaagtccattcctctccattgcattcgagtcaattgcattacatgctattctattccagtccattccattccattcctttccattccattccattagagtccattccattccattccattcaactccattgcgttgcattccaatccaatttggtccattcctttccattccattacattcgagtccattattttccataacattccattccatttgggtgcattccatggcattcaattcaagtccagtatattccactccattccattcaagtccattccattccattccattccattccactccattccattcgaatccattccattccattccattcgaacacatttcgttcattttcattccattccattcgagttcattccactctgttacaacaaattccatcctagtccattcaatacaattccatcccatatgggtccattccactccattccgttcgagctaattccattctatttgagtccattccattccattgtattcgaatccattccgttccatgctattacatttgagtccattccattccattccattcgagtccattccattcaaacccattccaatccagtccattctgttccatttcattcttttccattccattccattccattccattccattccattccattccattccattccatttgaggcaaatccattccattggattcaattcgagtccattccattccatttcattccattcgggtccattcccttcaagtccttttgagtcatttccattccattcctttgagtccattccattgcattccattccattcgaatccattccattccattccattggattccattccattgtattccatccgactcctttggagtccatccaattacattccattccattcgagtccattctattgtattccattggtgtccattccattccattccattccattccattccattccattccattccattcgagtgttttccattctattccattcaagtccattccattccacaccattagtgtcctttccattaaaattccattgtattccattccagttcattgcattcctttccattcctttcgtgtccatttcattccattctattcgattccattgcattccattcgagtccattctgttccattccattctattccattcgagaccattccattgcattccactggattgcattcctttaaattccaatttattctatttgagtccattccattcaattcctggacttcccattccattggagtccattccattccattcctttttaattcattccattccatcctattctattccattcatgtccaatcaaatccataacattcccttccattgcattccattgcattccattccattccattccattacattccattccagtcggttccattccctttcattccattcgaatgcaatccatcccattctaccctattcaggtccactccatttcattcaattcgagcccattcctttctgttccattacattccattcggggccattccactccattccataggagtccattccataacattacattccgtttgattcaagttcactaaattcctttccatttcaatcgagtccattccattgccttccattctattcgagtccattcgtttctattccattcgagtcaattccattccattccattcgaatgcattccattccattccattccactccattcctatccattgggtccattcctttccattccattccattcgagtccttttctttcctttacattccattcgagtccattccattcaattcctttcgagtcctttcaattaaattccattccattcaagtccatgccactccattccatacgagtccattccattctactccattccattcgtgtccattgcattctattccatttgtttgcattcttttccattccattcgagtccattccattccattatattccattcgactccattccattcaatttcattccactccagtccaatctattccattcgaatccattccattccattctattccatttgagtccattccattccatttcattcgtgtctattccattccaaaccattccattcgaatccattccattccattccattccagtccattccattcaactccattccattcaaatccattccattccattccattcaagtccattccattgaactccattcaattcgagtccatacatttccattccattctactcgagtacattccactccattccattccattcgtgaccataccattcaattccattcgagtcaaatccattccattccattcgattccattcctttgcattccattctatcccttttgagaccattcatttccattccattccattagagcccagtcctttccattccatttgagtccattccattgcattcctttccattcaagtatattccattctattccattcaattcaattccattccattcctttggactccattccattagaatccattccattaaattccgttccattccattcgagtccattccattccattttagtccattcaattccattccatttgagtccattccattccattccattccattccattccattccattccattccattccattccattccattccattctattctattcaaatccattccagtcatttccattccattccattccattccattccattccagtccattccattccattcgggtccagtccattccattccattcgagtcttttctattcctttcgagtccattgcattccaatccatttgagtccattccattccattcgagtccattcctttccattcctttccattccattcaagtccattccattccttttgggtccattccgttccattccattccattccagtccattccactggagtccattccattccattccattccattccattccattgcattccattccattccattccattccattccattccattgcattccattccattccattccattccattccattccattccattgcattccattccattccattccattccattccattccattccattccgttgcattccattccattccattccattgcattccattccattccattgcattccattccattccattccattccattgcattccattccattccattccattgcattccattccattccattgcattccattccattccattccattccattgcattccattccattccattccattccattccattccattccatttcattgcattccattccattccattcatttctggtccattccatttcattccagtcgagtccattccattctaagccattctacttgagtctcttccattccatttcatttgactccattccattccatgctattccatttcagtccattccattccattccactcgggtccattccattccattccattagagtccattgcattccattgcactccattttggtccattccattctttccgttccattcgagtcctttattttccataacattccattccattcacgtgcattccatgccattccattagagtccagtccattccactcaattgcattcgagtccgttccattccattcaagttcattctattccattccattcgagaccactgcattccataacattccattccattacttttgggtccattcaattcaactgcattccattcgtgtccattccactgcattccattccattccattccattccattccattccattccattccattctattccaaccctttcaattccactccattcctttagagtccattcctttccattggagcacatttcattcctttacgttacattccattcgagttcattccattccataacatttaattccattcaagtccattgagggccattacattccatatgagtccattccactccattccgttcgagtccattccattcctttcgagtccattccattccattgtatttgagtccattccattccatggtattctgtttgagtccattctgttccattccattccatacaaacccattccactccagtccattctattccattccattcttttccattccattccatttgagcccaatccattccattgcattgaattccagtccattccattccattcgggtccattcccttcaaacccattcgaatcaattccattccattccttcgagtccattccattgcaatcctttccattcgagtccattccattccattccactggattgcattccattgtattacatccgaatcctttcgagtccattcaattccattccattcaattcgagtccattccattctattccatttgagtccgttccattccattccattccattccattggattgcattccattgtattacagccgaatcctttcgagtccattcaattccattccattcaattcgagtccattccattctattccattcaagtctgttccattacattccattccattcgagtctattccattcaattccattccattccattccattagtttcctttccattaaaattccattgtattccattccagttaattccattccatttcattccattcgtgtgcatttcataccattagagtccattccattccattcaatttgagtccattccattccattctattccattcgagatcattccattgcagtccattggagtccattactttaagttccattctgttacattcgagtccgttccattccattccattcaattcctggcctttccattccgttggagtctattccattccattctttttgaagtgattccattccatcccattctattctattattgtccattccaatccatatcatttcattgcattgcattccattgcattccataccattccattcgtgtccattcccttttattccattcgagtgcattccattccattccatgccattcggctccacttcattctattccattcgagtccatgcctttccattccattccattccattcaggtccatttctttccattacatacgagtacattccataacattacataccattcgattcgagtacattaaattcctttccattccattctagtccactccactccattgcattcgagtccattcgatttcattcctttctattcgagtccattcattctattccattctagtccattcctttccattccattctattccattcaggtccatggcattccattacatacgagtccattccataacattatattccattcgattcaagtacattaaattcctttccattcctttcgagtccactccactgcattgcattcaagtcccttccatttcattcctttctattcgtgtccattactttctattccattcgattcaattccatttcattccattcgattgcattccattccactctattcttctccatcgagtccattcctttccattatattacattggagcccttttcattctgttacattccattcaagtccctccattccattccttttgagtccattcaattaaattccattccattcagtccatgccactctattccatacgagtccattccattccactgcattccattcgtgtccactgcatgctattccatttgagtccacgcatttccattccattcgagtccattccatttcattatattcccttcaagtccatccctttcaattgcattccattcgagtccaatccattccattatagtccattccatccattccattctattccatttgggtccattccattccatttcattcgtgtctattccaaaccaatacattccatttgaatccattccattccattcccttccattccattccatttgagtccattccattcaattccattcctttcgagtccataccttttcattccgtactactcgagtacattccattccattccattccatttgggtccacacccttcaattctattcgagtcaaatccattccattccattcgattccactccattgcattccattccatccctttcgagaccattcaattccattccattccattcgagaccattccattccattccatttgagtgcattccattgcattccagtccagtcgagtacattccattctattccattcgattccattcctttccattccattccattggactccattccattagaatccatttcattaaactccattccattccatttgagtccattccattccatacgagtacattcaattccattccatttgagtccattccattccattccattctgttccattcaagtccattccattccattacagtccattccatttcattcgggtcctgtctgttccattccattcgagtcttttccattccattcacttccattgccttccattccattcctttccattccattccatttgagtccattccattccattccattttagtctattccattgcattcatttccattccattttagtctattccattccattcctttccattccattcaattccattccattcctttcaagtccattccattccattccattcgagtccatccctttccagcccattccactcgagtccattacattccgtttcatattccattgcactccagttgattccattccattccattccattcgacagcattcctttccattcgagtccattccattccattcaaatccattccattccattccagttcattctattctattacagtccactccattccattccattaggttccagtgcattccattccattcgagtcttttccactccatttgaatccattgcatttcatttgatatgagtccaatccattccattccattcaagtacattccattccattccattccattccattccattcgagtccagtccattccattccattcctttcgggtccattccattcgagtccattcctttccagtccattccactcgagtccattcctttccattccatattccattccactctactccattccatattccattccactcgagttgattccattccattccactcccttcaaggggattccttccaattagagtccattccattccattccattcgagtacattccattccaatccttttgaatccattcaattcaattgaattcccttcaaatccgttcgaattcattcctttacattccattctattcgagtccatttcattccattccattccattccattccattcaggtccacttcattccattacattcctttccattcgagtccattcaattccattccattccataagaatccattccattccattccattcgactccattccattccattccattagagtccgttctgttctattccatttgagaccactgcatttcattgcattccattccattccagtccattcctttcgggtcagctcaattcaactgcattccatttctgtccattccattgcattccattgcattccattccattccaatccatcccattccattccgttccactccatacctttcgagtccattccattccattccattcgagtacatttcattcaattactttccattccattggagttcattccactccattacattaaattccattcaagtccattcaatgccattccatttcatatgagtccattctactccattccgttcaagccaattccattccattcgattccattccattccattttattcaagtccattccattccgtgctattccatttgagtccactccataccattccattcgagtccattccattcaaacccattccaatcaagcccattctattccattccattattttccattccattccattccattccatttgagcccaatccattccattgcattcaattcaactccattccattcgggtccattcccttcaattccattcgagtcaaatccattccattccttcgagtccattccattgcattccattccattcgagtccattccgttccattctgttggattccattccattgtattccatccaactcctttcgagtccattccattccattccattctagtccatttcattccattccattcgagtctattccattcaagtccattccattccattctattagtgtccattccattaaaattccattttattgcatttgagttcattgcattccaatccattccattcgtgtccatttcattccattcaagtccattccattgcatttcattcgaatccattccgttccattctattgcattcaagaccattccattgcattccattggagtcaattccattaaattccaatttattccactcgagtccattccattccattccattcgattcctggcctttccattccattggattccattccattccattccttttgaattccttccattccatcccactctattccattcatgtccattccaatccatagcattccattccattccattcaattccattccatttcattcaattccattctattccattccattccattcggttccattccctttcattccatttgagtgcattccattccattccactccattcgggtccattccattccatccctttcgagaccattccattccattccattccattcgagcccattccattccattccatacgagtccattccataacattatattccattcgattcgagtccactaaattcctttccattccattcgagtcctttccactccattacattcgagtccattccattccattctattcgagtccattcctttatattccattcgagtcaattccattccattccattccgttcgagtgcattccattccattccattccactccattcctatccattgagtccattcctttccattacattcctttcgagtgcttttgattctattacatttcattcgggtagatttcattccattcctttcgagtccattcaattaaattccattccattcgagtccatgccactccattccatacgagtccattccattcttctccattccattcgagtccattgcattctattcaattcgagtccattcttttccattccattcgagtccattcgattccattatattccatttgagttcattccattcaattgcgttccactcgaatccaatccattccattggagtccactccattccattccattctgttccatttgagtccattccattccatttcattcgtgtctattccattccaaaccgttccattcgaatccattccgttccattccattccattcgagtccattcctttcaataccattccattcgagtctatacgtttccattccatactactcgagtacattccattccattcctttcctttcaggtccataccattcaattccattcgagtcaaatccattccattccattcgattccattcctttgcattccattccatccctttcgagaccattcaattccattccattccattcgagcccattccattccattccattcgagtccattccatagcattcctttccattcgagtacattccattctattccattagattccattccattccattccactggactccaatccattagaatccattccattaaattgcgttcctttccattcgagttcattccattccattttagtccattcaattccactccattggagtccattccattccattctattctattcaaatccaatcaattccattccattccattacagtccattccgttcagttccagtccattccattccattccattcgagtcttttctattccttttgagtacattgcattccaatccattcaagtccattccattccattccattcgagtccattctgttcaattcctttcgattccatttgagtccattccattccattctattacttttgggtccattccattccaatccattggtgtccattccattccagtcctgtccattcgatcccactccatttattccactccattccattccattccattccacgcgattccattccatttgaatcaattccttttgagtccatttcgttcctgttcattccattccatttcagtccactccactcctttccactcaaatccactccactccactccactccgttccattgcattccacaccagtcccctcctctccactccactccactgtgttcgattctattccttgccattctctttcattccactctgttccattccactacccaccactccattcatttctgttgcaccccattccattccactccaatccactgcactccactccacatcatcacattccattcaattccattcgatgctatttgatttcattccattcaattccattccattcaattccatggcattcgattccattccttttgattcaattccattccattccaatttattcgagtccattctgttccagtgcattccattggagatcattgcattcgcgcccactccattccactccattccatttgagtccattccattctagtccattccattgcactccattcctttacattgcattccattccactccattccatttcattccactccactccataccactcccctcctctcctttccattccactccattccactcctttccactccactccactcaattcaattccaccccactccactccactccaatccgttacattcctttccattcctctccattctgctcatctcgtatccactcaactgcactccactccacttgagtccattccattccactcaacaccatttctctcctctccactccactccactccactccaccctattccattgcattcctctccactccactccagtgcactctgttcaattccattccttcccattccattcaatttcactacattctactgaactcactccactgcattcaattccattccaccccattccattccaatgcattccaaaccaatccactccacttcaccgcattccatttgaatccattcgatgccatttgattccattccattcgattccattccattggattccattccatgcgattgtgttccattccattcaatgccattcgattcctttccattggattccattccatgcgattgtgttccattccattcaatgccattcgattccattccattggattccattcaattggattccattccactcgattccgttccatttgattccattcgggtccattccattcgagtccattcaattccaatccattccattccattccactccagtccactccacttccttaaccgcattccactcgattccattcgatgccattcgtttccgttccattggattccgttccgttggctaccattccattcgattctactccattccattccgttccattcgattcccttccattcggtaccattccgtttgagaactttccatttgagtccattccattccattccattgcattccactccagtcaactccactgaactctactccctactatttcattccttcccattgcattccattccactgcattccactccactccagtccattcaaattcattccaccgcattcctttccactatattcctctgcactccactccacttcaccacattccatttgattccattcgaagccattttattccattccttttgattacattcaattcgattccattccattcgagtccattccattggagtccattccatttgagtacattccattccattccattccaatccactggattcttttccattacattccactccactcctctccactccattcaatttcattccttcccattccattccactccactccattcccctccactccactcaattccacttcattccactcaaatctactccattccattccattccaatccactccacgccaatccactccattacactccagtctattccatttcattccattgcattacactccagcccactccactgcactccattcaattccattccttcccattccattccattccactctatttcaccccactccaatccactccattcaattccattccacccctttccattccactacctgccactccaatcttgtacaatccactccattctattccattccttccaattccattacatttcactccattccactcaacttcaccccacttcacagcattccattcaattccattcaatgccattggattccattccattcgattgcattccatttgattgcattccatttgattccatttcatccgattccattccattcgattccattccttttgaatccattctatccgcgtccatgccaatcgactccattccattccagtccattccattgcagtctgttccaatccattccattccatttcaaaccactgcactccactccactccatgccattgcactcaattctattccattcgtttccgtttcactccattaaactccactccactccactccacaccacttcactccattccactgcattccactccattccaatttgtagcattcctttccattcaattccgcagccttccattccacttcactgcactcaacttctttccattccattccattcctctctactccacaccactccattacaattccattccactccattccattccactccattccactccatccactccacttcaccgcaatcctatcaattccattcgatgccaatcgattccgtgccattgtgttccgtgccattttgttccatgccattcgattccactccattccattcctttcagttccattccattgcattccactatattcctttccattccactccattccattccattccattccattccattgcactcaactccactgcactccattgaactccattccactccgtttcactccagtccactccactcaattccgctacattacactccactccaatccactccagtacactccaatccatgaaaatccattccattccattccactgaatttcactttactctactccactccacttaagtgcatttcatcccactccactcgaatccactccaatccattccactccactccactcaattccattccactccattccattccattccattccataccactcctttccactccactccactgcaccgtattccatttgattccagtcgatgccatttgattccattccatttgattccattccatttgattccattccatttgattccattccattcgagtccattccattccagtccattccattagagtccattccatttgagtccattcccttcaagtcaattcctttccattcctttccattccattccacaccattccatttcatttcactgcattccttttcattccaatccaattcactccacttcactgcacaccactcctttcaaatccattccactccactccactgcaatccactccattaaacttcacgcaactccactctactccattccattcctttaaattccactccattcctttccactccattctacttcactcccctccagtccactcaactccactccacttgtgtgaattcccttccactccactcaaatccactatattccactccattcgaatccacaccactaaactacattccactccattcctctccactcaattactttccattccattgcattccactccactccaatcctctccactccattccattccattgcattccattgctctccaatctactcctctccactccattccattccaacccattccattccactccattccactccactccacttcactgcactccatttgattccattcgatgccatttgattaaattccattcgattccattccattcgattccattccacatgattccactccgtttgattccattccattccattccattccattcttttccattcgattactttccattccagtacgttgcattccattccattccgtttcattccattccaatccaatccacttttctccactccactccattgcattccatttcaaggcactccattgcactccactccattaaattccattccttttcattccatgccattccactcctttccactccactctactcctttccattccattccgcaccattccattgcactcctttccactccactcccctccaattcaccgcattccttttgattccatccgatgacattcgattccttttcaatcgtatccactccattccattccattcctttcaattccattccagttgattccactccattctataacatttatttccatccgattcctttccatttgattacattccattccagtccattccatgccattccattccatttcattccatttcaccctactccactccactccactccactgcactccactccattaaattccattacttcccattcaattccattccaatcaaatccgctccactccattctattcctttccaaaccattgtttgcactccattcaactgcaatccactccacttcaccgcattccattcaattccattcactgccattcgattctattccatttgattcccttacaatcgagtccattccattccagtccattccattccagttcattccattctagtccattccattccagttcattccattcgagtccattccattcaagtccattccattcgtgtccatttgattgcattccattccattccattccattccattccattccgttccattccagtccagtcctgtgaattccattccatgttttccactccattccattccattcccttcccttccattccattccattccattccattgcattccttttcactaaactccactctgttccatcacattccttcccattccaatccactccattccactcgactccattaatttcagttccaccccattccattccactccattccactccactccattctgcttcaccgcattccgttcgattccattagatgccattcaattacattcctttcgattcctttccattccatttcattccattccattcaattccattccacttcactccattccattccacttcactccattaaattccactcctctccactgcattccactccattccactccattgcatgccactccattccattccattccattccattccactccattccattctgttccattccgttccactccgttccattccattccattccgttccattccgttccattccattccactccattccactccattccattccattccattccactccacttcactccattccactccattccactccattccgttccattccattccattccaccacattccatcccattccattccactgcactccattcaactgcactgtatttcatttgattcctgtcgatgccatttgattccattccattcgattccactctattcatgtcccttccattccagtccattccattcgagtccattccattcgagtccattccattagagtccattccgtttgagtccattccatttcattcctttcagttccattccattccactccattccattccgttgccctacactcaattccattccactccactccatttcacttcattccacaccactccattccactccactccactccactgcattccattccattcaattccactccattctattccactccattccactccattccattcaactgcatcccactccattcaactgcattccatttcatttgattccattccattccattcccttccactccactccattcctttcaattaatttctgtcccattccattccttcatattccattccatttcattccattccactcctctcctctccactccattcaactccattccaccccattccattcaactccatgccactccactgccctccagtggaccacattccattcgattccacttgatgctgttcgattccattccattcaattccactctattctatttcattccattcaactccattccattctattccattgcgttaaattccattaaattttattctgttgcattcgagtcaattccattcgattctatttccttccattccattccattcctttccattccattccattccattccattctactgcactccactccaatcctctggactccaccccattcaataccattccattccattccattccatcccgtttcattaaataccactccattccattccactccactccactccactacaatccactccattcctctcaattccattgcactccatgccgttccactccacgacattcctttcaattaatttctgtccaattccattcattcccattccattccattacattcatttccactccgctcctccccatgccattcaactccattccaccccgttccattccactccattccactccactgcactccagtggaccacattccattcgattccatttgatgccgttcgattccattccattcgattccactctattctattccattccattcgattccattggatgacattcgattccattccattcgattccactctattctattccattccattagattccattccattcaattccattgcgttcaattccagtaatttctattccgtttcgttcgagtccattccattcgagtctatttcattctattccattccattcctttccattccattccattccattctactgcactgcactctaatcatctggactccaccccatttaataccattccattccatcctgtttcttttaataccactaaattccattccactccactccactccactccactacaatccactccattccactccattccattccactccatgccattccattccactgcaatccaatccaaaccactccactccattccattcctttcctctccattccactccattccattccattccattccactccactccactccgttccattccattccaatccattccattccgttccattccactccattcaattccattccattcctctccattccctagcactccatttcactccatgcaattgcatttcatttcgtttgattccattccaacccattcccttctagtcctctccactaagttcaattcctttctgtcccattccattccttcccattccactccattccactccatttcaccctgctcctctccactcccttcaattccattccaccccattccattccactccattccactcctgtgcactccagtggactgcattccgttcaattccattcattgccattcgattccattccattcgattccactccattccattccattccattccattccattccattccattccattccattagattccattgcattcagttccattaaattcgattccgttccattcgagtccattcaattccatttcattccattctattctgttccactccactccactccattcacctccactctacttcactccaatcctttccattccattcttttccttttcattccattccattccactccattccattccattccagtctattgcattccactccactccactgcactccaatccattccactcaactccaatccattccatttcctttcattccactccactccactccactccgttgaattccattccttcccattccattccactcaattcctcttcactccattcaattccattccaccacaatcctttctactccattccactccacacctcctcatttcaccacatgccttttgaatccatttgatgccattcgattctgctctctttgattccattcctttcgattccattcctctctattccattccattcgattccataccattagattcctttcctttcgagtccattccattccagtccatttcattccagcccattccattcgagtccattccattccattccattccactacactccattcgattccattccattccattcacttccactgcattccattccacaccactccaatttactgcactccactgcactaaattccattccattcctctccaccatattccattccactgcattccattccactccattcctttttaacccactcaactccactccatttcactccactccactccattccattccattgcattccattacactccattcctctcctccccactccactccactccattccactccactccactccattccattccattgcattccatcccacaccactcaactccattccattccattcccttccattccattccactccagtccattccatttcacaccattccattccactacattccactccactccactacactatattctactccactccactccgttccattccactccactcaattccactacaatccactccactccagtctactccattccattccattccattgcattcctctcaactccactgcacttctctgcattcctttggattccattctatgccattccattccactccatttcattccatttcatttgatcccattctatttatcccattccattcaattccattccattcgattcctttcccctcgactccaatccattcctgtccattccattccagtccgttcctttccattgcattccattcgagtccattccattccattccattctattccattccaatcctttccattccatttcattccactctactccacaccattacattctattcctttcctttccattctattccactcccctccgctcctctccactgaagtcctttctactccattccaatccactccattccattatgttacattccattgcattccactcttttccactccactcctcttcacaccaatccattgcattccaaggcactccactccattcaattctattccttcccattcatttccattccactccattaaactccactccactgcattccattccatttcaccccattcctttccactccatttcactccactccactccacttcaccgcattccattcccctcaattcgatgacattcaattccactctattcaattgcatttcattcgattccattccattcgattccattgtattcaagtccattccattggattccattcctttcgagtccattccattcgattcgattccattccattccatatcattacaccgcactccatcccactccacttcactccactctattcctcttcaatccattctattctattccactccattccactccactccattccacttgagtccattccattccactccactccattccactcaactccactccacttgagtcccttccattccactccactccaatacactccactccactcctctccttttaattccattcgttgcctttacattccattccactgcattccacaccacaccactccattcaattccattccaccccatttcatttcactccattccactccactccactccacttcaccgcattccattcaattccattcgatgccattcaaatcctttccattcgactccattccatttgatttcattccattcgattccattccattcttttccattcttttcgattccattccatgcaattccattcaattcgagtccattccattcaagttgattcctttccagtccattccattccattccagtccatttcactccgttccactccactgcactccatttcactaaactccactccactcaacttcaccacattcctttcgtttccttttgatgccattctattcctttccattcggttccactccattcgattccattccatttgattcaattcgatctgattccaatccattcgattccattccattagattttattccatccaagtccattccgttccagtccattccattcgagtccattccattggattccattccattccatttgaatccattccattcaataccattccattccagtccattgcattcgtgtccattcctttccattccattccattctgttccattccattccactcaactccactcaactgcactccattccattccattccattgcgttccactccattccactgaattgcatgcatttaattccattccttcccattccattccactccactccactccattccactccactccactccacctcattccactccactccactccaccccattcaaatcccttccaccacattctattccagtccactccactccacttcagcgcattatattcaatttcattcgatgccattcgactccctttcattcgattacattccattgaattccatttcattcttttcaattccatccaattccatttcatttgactccattccactcgagtacattccattccagtcctttccatttgattccgttcttttcccctccattcaattccattccttcccattccactccacttgactccaatatgctccacaacactccactccatcctattccattccattctattccactcccctgcacttcactccactccattcctttccattgcactccaccccattccactgcactccacaacgttcaaccccattccattcaactccactccactccattccaatccagtccactcctctgcattccataacactctattgcattccactctactccactccatttcactgcactccactccactctatcgttttacactccactccattcaattccctcccttcccattccaattaattccactctattccagtccactccactccactccgttcaattccattccccccattcatttccaatctattcctttccactccacttcactgcattccatttgattcaaggcgaatccattcgattccattccactcaattccattccattcgattccattccatttgattccattccatttgagtccattccattccagtccattcgattcgattccataccttttcactgcattctattcctgtcatttccatttcagtccatttcattcgactccattagattcgattccactccattccattccattgcattccatgccactccattccactccattccattccattccgttttcttccattattataccctcaactccattccattcctatccattccattcccttccattccactccactccactccattccattccattccattccattcttctccactccaattcactccactccacttcacgcctctccatttcattccattccattccattccactgcactcgcctgcattccattccattccattccactccatgccatgccattccattccattccacttcattcccttactttccattccactccattctaatccactcctctccactccactccactccattcgactgtactatcttccattccattccattgcattccactccactacattccactccactccacactgttcaattacaaccttccctttccgttcctttttattacattccactccaatccactccactccactccattcacttccattcctccctattcaaatccactccattccactgcactccactccacttcaccacattctattcgattccatttgatgccattccattccattccactggattccgttccattccagtcgattccattccatttgattccggtccattcgagtccattccattagagtccattacattccagtccattctgttcgagtccattccattccagtccattccactcgagtccattccattcgagtctattccattcctttccattatattgcattcccctccattccactgcactccagtccactccactcctttccattccattacattccactccaatcaactcctgtccaatccactccattccattccattgcatttcactacactctattccattccactccattccactccactccactccattcaattccattccaccgcattccattccactccattgcactccactccactccccttcacctcaatccattccatgccattcgattccattccattcgacaccattgcattcgatttcattgctttctaatcctttccattcgataccatgtattcgatttctttgctcttgaatccattccttttgattccattccactcgtttccattccattcaagttcattcctttcaactctattccattggagtccattccattccaatcctttccattggagtccattccattcgaatccattccattccagtccattccattccattccattccatttgagtccattcaattccattccattccatttcattcgaatccattccattggagtccattccattcttctccattgcattccagtcgtttccattccattccattccattccactccactccactcaactccattccactccattcaattgcaatccagtccaatccactccactccattccattcaaattcattccttcccattaaattccattccactccattcaactccactgcactccactccattcaattccctttcaccacattcaattccactccattccactccattgcactccattccactccacttcacttcactgcagtccattcgattccattcgatgccatttgattccattcctttcgattccattccattcaattccattccattcgatttcattccattcgattctattccatttgagtccattcctttcgagtctattccatttgattccaatgcattccagtccattccatttgagtccattcaattctattcgagtccattccattccattccattccattccattccattccattccactccactccattccacttgactttgttccattccattccactacattccactctattgcattccactccactacaatcaattccattccattgcaatccatttcattccattcctttccactccactccactgcagtacactcgactccactcctcaccactccattccattccattccattcctttccattccattttactctgctcctatccattccactcctttctactctattctctcccattccattccattccactccatgccattccattcctttccattccattccactccattacactccaatccactccactgcaatccactcccctccactccattccattccattccattctattccatttcattcctttgcattccattccactccaatccactccacttcactgtgttcaattccattcctacccattccactccatttcactctattccactccactccactccacttcacagcattttatgcgattccattcaatgccatttgattccataccattcgattccagtgcatttgattccattccgttcaattccactatatttgattccataccatttgattccattcccttacattccattccattcgtgtccattccattccagtccattccattcgagtccactcaatttgagtccattccattccattccatgccattaatttccagtccattctattcatttccactcaattttactccactccttttcattccattcctgtctgttccattccattccattccactccattaaactgcactccactctactccactccactgcactccactctactcttgtcaattccattctttcccaatacattccattccactccattccactgaccaccactccactccattcaattccattccaatccattccattccactccattctgctccactcctctccacttcattgcattccatttgactcgattcgatgccatttgattccattccattcatttccacttcactcgatttcattacgttacattccattcgattcaattccattccattcaattccattccatttgaggccattcgattcaagtccattccattcgagtccattccttgctattccatttccgtcctgtaaattctatttgattccattccattcctttccattccactcctctcctttccattccactcccctccattctactcttttccattccattccactctattccattccattccactcaactccactccactccaatccacaacactcaattccattccattccattgcataccactccactccactcctctcaactccactccactccattgaattccattccttcccattccattccactccactccactccattccactccacttcattccactctattccactccattccattccattacattctttccactccattccactccactactttcaattacattttttcccattccattgcattccactccattacactccactccactccactccaatcaattccaatccattccactccattccattcctctccattccgttccattcccttccacttcattccactccattccactccactccaatacagtgcattccattccattccattccatttccttcaattcaattccactccatttcattccatacctttcaattccatttcactatattcttctccactccactccattccattctgttcctttgcattccacttacctggtttccattcccatccattcaattccattccaccccattccttgccactactttccactccactccacttgtttccatttgattccattggaagccattccatgcgatgcctctttccagttgattccatttgatgccattcgatgccattccatttgattccatttcactcaattcaattccatatgattccatttcataagagtctattccattcgaggacattccattcgagtgcattcctttttagtccattacattcctgtccataacattcgattccatttcattccattccattccattccactccactccaatccattctattccattccattgcattccaccgcattccactccactccgttcaattccattcaatccaattcaatttcatttcactccattccactccactccactaaattctattccattccactccactccactccatttcacttcattgcattccactccactccactccaatccattccactgcactccactccacatctctccactccactccattccattcaattccactatttccaccccattccattccactccactccattccattccattccaatccactggattccattctttgcatattactccattccactccactcaactcaactcggttcaattctattccttaccattccattctattcaaattcatttgacaccactccgctctgctgcattcaattccattccactccattccactcgactccactccacttcatcgcattccactgtattctctttgatgctattctattccgttgcattcgactccattccattctattccattccattctcatccattccatgcgagtcccttctatttgattccatacaattcgagtccattacatgcgagttcattcctttcgagttcattccattcaaatccattccatccaagtccattatattccagtccattccattccagtccactcccttcaagtgcattccatcgagtccattccattcgagcccattcctttccagaccatttcattccagtccattacattcgaatccattccattccattcctttcaaatccattccattccattctattccattgcatactactccactccacacaactccactctactccattccattgcattgctttccactccttttcattccactccaatccgttcaattccactccttccaattccattccattccaacccattccaatgcactccactccactcaattccattctacctcattccattccactgcgtttcaatccactccactccacttcaccgcattccatttgattccatttgatgccattcgattcccttccattcgattccatacaattcaattctattccactcaattccattcaattgcattccattccattcccttccattcaagtccattccattccagtcccttccattccattccattcccttccattccattccattccactccattccactccactccataccactctggtgcattccattaaattcgactcaattccacaccatttaattcaattccattccattccagtccattcctctccactacactacactttattcacctccactccactccattccattcaattcctttgcattccactccattccactccactccattcaattccagtcctcattccattccattccaatcgattccactccaccccattccattccattccactccagtccattccattccacttcattccattccactccactccactccactcagttcaattctattccttccaattcaattgcattccattccattccattccattccattccattccattccattccattccattccactcaattccattccattcaattcccttccactccactccagtccactccacttcatcgcattccattcaattccattcgatgccatttgattccattccctttgattccattccattatagtccattcaattcgattcccttccattcgagttcattgcattcgagtccattccactccattccattgtattccattccaatcatttccattcccttccagtacattccagtcgagtccattttattagagtccatttcattccattccattccagtccattccactcaattccattcctttccattccattccattccattttactccattgcaatccactccactccactaccttccattcctttccattggatactactctccactccactccatccaattaaatttcttcccattccgttccattccactctattccactacacttcactccattcaattcccttctgcgccataccattccactccggtccactaaactccaattcatcgcattccttcctattccgtttgatgctattcgattcctttcctttctattccattccatttgattcgattccattcaattcctttccattcaatttcattactttggagaacttccatttttgtccatcccaatcgagtgcattccattccagtccgttccattccagtaaattccatttcagtccattccatttgagtccattccattccattccaatccattccaatctcttccattccattccactccactccactccactccactccaatttattccattacattgcattccactccactccactccaatccattcctttcctttccattgcattccactccactccactccactctgttcaatatcattccttttcattgcattccattccactccactccactccactgcactccactccaataaatttctttcaaccccattcaactctgttccagtccactccaccccactccccttcaccatttaccattcgaatccagtcgatgccatgctgttccattctgttggttttaattccattcatttccattccatttgatcccattccattcgattccactccattccctttgagtccattccattccagttcatttcattcgattccattccatctgagtcattccattccattccattccattccattccattccattccattccacttcaccccactccattccatccactccacttcactccactccattctattccactccaatgcattccacttcatttcactctactccattccattctattctattctattccaccaccactacattccattacactgcattcgattccactgcatttctttccactccattctattccattcacatgcattacacttcacttcaatccactccactcccctccactcgactccactccattccataccattccattgcattccaatccactgcactccactgcatttaattccattccttcccattccattccactccacttcagtccatttaattccattccatcactttccattccaatccactgcactccaatccactacactccacttcaccacattccattcaatgccattcgattccattctattccattccattccattccattccatccactaccattccatccgattccattctgtttgattacactccattcaattacattccattcgattccattctgttcgagtccattccattcaagtgcattctattcgactccattccattcgaggacatcccattccagttcattccattcaagtccatccaattcgtgtccattccattccattccattctactccattccattccactccaatgcattccattaaactccacaccactccactccattccattccattctgctccattcaactccattcttctccactccactcaactccacaccactccactccactacattcccctccactccactcccctccattccattccattccactctattccattctactccactccactccactctattccacgcccctcctttccattccattcgattccactccattccactccactccactccacttgagtcatttccatcccactccactccattccattacactccactccacgactctatactcgactccattccactccactccactccactccattatattccagtcctgggcattccaatacactcctctcaactgtactccactacaatccattgcattcaattgcactccaatgcacttcactccactccactccattgaattccattccatccattccattccattccactccactccattccgttcaattccattccttcccattccattgcattccattccattatattccattccattccactcaattccatttcattcaattccattccactccactcgactcctctccactcaattccactccacgctactccacttcactccattccacgccagtccactctgctctactccactctaccccattctattccatttcattgccttcaactccactccactgcactccactgcactccgttcaattccattccttcccattccattccatcccactccattccactacactccattccagtatattcaattccattctaacccattccatcacactccattccacaactctccactccacttcatcacattccatttgcttccattcgaggccattcgattccattccattcgattacatttgatgcctttcaattccattccattccaactcaattccattcgattccatacctttcaattccatcccattcgattcgattccattccattccattcaaatccatttgagtccaatcaattcaagtccattccattccactctcttccattccattccattctattccattccattctattccactccactccattctactgcactccactccactcctctccactccactgcattgctttccatcacattgcatttgattcaattgctctccattccattccattccattccattccattccattccattccattccatttcattccattcctctccattcctcaccactgcactacagtttactcctctccactccactccactacattccattcctttgcattccactccactccactacattcaattccattcattcccattccattccattccactccattcgactgcactgcaatccactcgattcaattgcattccaaaaaatttcattccaatccattccactccattccactccaatcttttccattccattccactcgacaccattccattccactccactcaactccactccattcttctccactccactccactacaatccactacactccaatccaatccatgtccttccattccattccattgcattccactccactacattcaattcaattccattccaccccattccattccactacattccactccactccattcaattcaattcattcccattccattccattccattccatgacattgcagccactctatgccacttcactgcattccatttaattccattagattccattcgttcccattcctttcaaatccattccattaatttccattcctttctattccattccattcgattacattccacttaagtccattctattcgtgtccatttcattctagtccattttattccattcctttctactccactccactacagtttactccactccactccactccattccattcctttgcattccactccaatccactccactccactccaatcaattccattcattcccattccattccataccactccattccaccccactccaatccactccattcaattgcattccaccaaattccattccactccattccactccactccacttctccacattccattcaattccattcgatgccattcgattccattcctttcgaatccattctattcaattaattcaatttgattccatttcatttgattctattccattccagtccattccattcgtgtccattccataccattccattccattccactccacaccaccccaccccactccactccactccacaccattcaattccattccattgcattccattccactcctctccactccactacattaagttccattccattccattccattacaatacactccattccactcccctccactacattccagtcctttccactccactccattccatttcattcaattccactccactcctctccactccacctcactccattccactccactgcactacacaccactccactccattccattccattctatagcattcaactcctctccactccaatcagttaaattcctctcctgtcaaccacattccattcccctccattccattccattccactcactccattccattccaatccactccattcaattcctttcctatcccttacattccattccatttaatttctttgcactccattccactccattccactccatttctttacattccattttattacattccacttgacaccattcaattccactcccctacactccacttcactcctgtacagtccactacactccaatccaatccatgccattccaatccattccattgcgttcctctcccatccattcaattcaattccattccacccgattccattccactccattccaatccattacacaacactccattcaattccattccttcccactctattccattccacttcattccactccactccactccacgccacttcactgtattccattgaattgcattcgattcccttcgattccattcctttcaaatgattccattcaattccattcgattcaattccattccattcgattctattccactcaagtccattccattcgtgtccattccattccagtccattctattccattctgttccactccacttccctgcactcctctccattcaattccattccattgaattcctctccactccactccactgcgtttaatttttttccattccattccattccactcaattctactcccgtttactcattccattccattccactccaccacattctatttcattccattccactccactccactacaatccattccactccactccactttactcctttccactcgactccattccattatattccatagcattccactccactccacaccactccgttaaattccaatcctgtcaaccctattccattcccctcaattccattccattccactcatctccattccattccattccattcgaatccactccattccattccactccactccattccattccattccataagattccactccactccactccattccattccattcaattcctttccactgcattccactccattccactgcattccattccattccatttcatttcataccactcgacaccattccattccactccactccactccactgcactccattccactctactccactacaatccactgcactccaatccaatccacaccattccattccattccatttcattcctctccactccactcagttcaattccattccacctcattccattccactccattccactgcattccactccactcccttcaattccattccttcccattcctttccattccactgcattccactccattctacgccactttaccgcattccattgaattccattcgattcccttctgttcttttcgtttcacatcaattccattcaattccattccattcaatttcattcctttcgattccattccactcaagtccattctattcgtgtccattccattccagtccattctactcgattccattccactcccctccactacactccagtcttctccattcaattccattccattgccttccactccactccgttcaattccataccattccattccactccattccactcccatccactccattccattccattccacccaccatattccaattcatcccattccactccactccaccatattccatttcatcccattccactccactccattccactccattccactccactccaattcactgctttccactccactccattccattacattccatagcattccactccactcccctacactccactccactctgttaaattccattcctttccactccattccattcccctccaatactttccattccactacgttacattccattccactcctttccattccatcccattccaatccattccattccattccattccattgcattccattccatttatttcaactccattccattccattccactacattccattccattctattccattacattccactagactccattcctttccactccactccactccactccactccactcccttccactccactccactctactacactcaactccaatccatgctgttcccttccattccattgcattctgctccactccactccactccattcaattccattgcacaccattccattccaatgcactgcactccaattaaccacattccattccattctgtttgatgccatttgattcctttccatttgattccatttcattcaattccgttccattctattccattccatttgattccattgcattcgagtccattccattcgagtccattccattgatgtccgttccattctagtccattcctttcctgtgcattccattccactccactctactccactccactccactacactacactccattccactactctccactccactctactccactcaactccaatccatgctggtccattccattccattgcattctgctccactccactccactccaatcaattccattccacctcattccattccactgcattccaattcattgcactccaattaaccacattccattcccttccactcgttgccttccgattcctttccatttgattccattttattcaattcagtgccatttgattccactccgtttgattacattgcattcgagtccataccattcgcgtccattccattcaattccgttccattcgagtcctttccattccagtccattccattccattcctttgcactccttaccattcctttgcattccactcctctccgctccactcaactccactcagttcaattccattccttcccattccattccatcccactctattgcactccagtgcactccactgcattcctttccattccaccccattccaatccactcaattacactcctctccactccacttcactgcataacactggattccattcgacgcctttccatattatttcatttgattccattccattcgattccattcagtacgattcctttccattctactccattacattcgagttcattccttttgagtccattccattccagtccattccattcgggtccattccattccagtccattcccttgcagtccattccgtttgagttcattccattccattccattccattccattccattccattctatttaattccactccaatccactccactccactccattccattccatttcattctattgcattccaatccactcctctccactcaagtctgttcaattccattccttcccctccattcaattccactccattccactccactctgccccactcaattcaattccattccaccccattccattccactgcatttcactccactccacttcaccgcattccattcgattccatttgatgccattcgattccattgcattcaattccattccatacgattccattccattccagtcaaatccattcgagtccattccattttgcatcccttccattccagtcaattccattggtatccattcaattcgattccattccatttgattccattcctttcgaatccattccattcaattccattctgctcgaatccattccattcaattccattccattcgagtccattacactccactccattccattccagtccattaaattccagtccaatccattctaattcattccattccataacctttccattccattccattacattcaattccattccattcgtgtccagtccattctagtccattccataccagtccattccactcgaatccattccattcgtttccattccatttgatttctttccattcgaatccattccattccagtcgattccattacagtccattccattccattggaatccattccattcctttccattccattccattgcattccaattccctacactccattccattccattccattccattccattccattccattccatttaactgctgtccactccactctactccactgcattccattccattccattccatttaactgcagtccactccactctactccactgcattccattccattccattccattcgattcaattgcactccattcctttccattccataccattccactccattcctctccactccactagaatttactccactcccctacactccattccattccattcttttgcattccgctccactcgcctccactccattcaattacattcattcccattccattcctttcctgtccattcaaaaccactccactccattcaattgcattccgccaaattccattacactcaattccactccactccacttcaccacattccattcgattccatttgatcccattcaattccgttcctttcaaatccattccattctattaattccatcccattcccttccatttgattccattccattcaaatccattccattagattccattccattccattccattccattgcattccattcgactccactccactccattcaattccattccattgcattccactccactccacttcactccgttaaattccattccattccattccattacattgcactccattacactctcctctactctattccaatcgattccactcaactccattccatttaatgtcattcaactccactcctctccactcttctccactccattccactccagtcctctccactcctttccactccaatccattccactccattccactccactacagtccactaccctccaatccaatccatgccattccattccattccattgctttccactccactcctctccactccattcaataccattctatcccattccattccattgcatttcactccactccactcaacttcaccgcattccattcgattccattcaatgccattcgattccattccattctattccattgaatccgagtccattccattccagtccaatccattctagtccattccattcacgtccattccattccattccattcctttcgtgtccatttcatttgattccatttcatttaattcaattccatttgattccattccattcgattacattacattcgattacattccattctattcccttgtatttgattacatcccatttgattccataccattcgattaagttccattcaaaaccattccattccattccactccattccattccattaaactccgctccactaaaatgcaatctactccactcctctccattccattgcactccactccaagcccctccacttcattccattccattccattgccctccactccattcaattccattccttcccattcaattccattccattccactccattccgctccactccactccactgcttttatttccattccattgtattccattccgctccattccattccactccacacaactccactccaatccattccattccattccgttgcattccactccactccattccactccattccattctcttccttccgattccattccctcccgttccgttccattccactccattcctttccactgcactccactccattcaatacaattccaccccattccattccactccatcccagtccactccactccacttcaccacattccattcgattatattaaatgccattcgattacattccttttgattccattccattcaattcctttctattcgggtccattgcattcgagtccattccgttcaagtccattgtattcgtgtccattccattccattccattccattccattccattccattccattcaattccactccataacactccctgcactcctctgcactccacttttctgcactccattccattccattcctttccaacccattccattccaatccactccattccattctattccactccactccattaaattccattccattccattatattccattccattccattccattcccttccattccaatccactgcattccattccattccactcgactccattccattccactccactccactccagtccactccattccactccattccattactttgcattgcattccattgcattttattctgctctactccattccactccattccattccaatctgatccactccactccactcaactcaagtccactccaatccattccattccattccattgcattccactccactccactctgttcacttcctttccttcccattacattcctttccactacattcaactccactccactcccttcagttccactgaacaccattccattccactctactccacttcatttgaccatattccattcgatttcattccatgccatttgattactttccattcgattccattccactcgattccattcctttagattccattacattcaattccattgcgtttgattccagtccgttagattccattccattcgattccattccattggatgcttttccattcgattccaatctctaggtttccattcaattcgagaccattacattcgagtccattccttttgagtccattcctttcgagtccactcaattggattacgtgccattcgagtccattcgattagactccattccattccagtctattccatttcaatccattccatgccattcttttccattccattccattccactcggttccaccccactccactccactccattcctttccattccattccagtgcattcgtctccaccccactccactcatctctactccaatcaattccattcctttccattccattccgttccactccattccactccacttcacttcactccattaaattcctttccaccccattccattccactcccttccactccaattaactccagttcactaagtccatttgattccattcgatgccttttgattacattgcgttagattccattccactctttttcattgcgttcgattccattccattcgagtccattcctttccagcccattccattccactccattacatcacacttcgtttcatccaagcccattctattcgagtccattccattttattccattctagtgcattccaatccagtccactcctcttcattccattccattccactccattccattacactccattccactccactacactccattccatagcattccattcccttccattcctttcggttccattccattccactccacttcattccattccattccattccattgcagtccattccactccattccactccactccattccgttcacttccacgccttcccattccattacattctactccactccactagaatccaagctactacattcagttgcgttccacatgattccattccactcaattccactccactccactccacctcaccacattctatttggtcccattcgatgccattcgtggccattcgattctattacatttgattccattccattcgattccattccattcgattcctttccattcgattctattccatccgattccactccatttgagtccattccattccaatacattccattcgagtccattccattcgagtccattcaattaatgtacactatattccagtccattccatttgagtcttttccatttgagtccatgccattccattccattccactccaaaccactccattccactccactacactcaactccattcaactccactccactccagtccactacactccactccattcccttcctttccattccattccattcaattccattccattcctttccactccattccattccattccattccactcgactgcattccattccactccacttcactccactcctttccactcctttcccctccactacaatccactacactgcagtccaattgacgccattccagtacattccattgcattccactccactccgctccactccattcaattccattccaccacattccattccactgcatttccctccactccactccactccacttcatcatattccattcgattccattcaatgccattcaattccattcgtttctattgcattccatccgagtccattccattccagtccgatccattcgagtgcattacttttgcgtccattccaatccagtatattccattcgaatccattccattcgattccgttccgttcgactccattgcatttgaatctattccattcgattctattccgttcgaaaccattccattctattccattacattccagtccattctatcccaatccattaaattccagtcccttccatttgaatccatgccattccattccattcaattccattctattcgtgtgccatccatttgagtccattccattccagtccattccattcgaatccattcaattcgattccattccgttcgtttcctttccatttgattccattccattagagtccattccattccagtccattaaattccagtccattccattcgaatccattccattcaattacattacattccactcccctacactcccctctactacattccattccattccatttcatcgcattcctctcctttccactccagtccgttcaattccattccttcccattccattccatttcaatccattccactccactccactcagttccattccactgcctttcactccactccactccacttcatcgcattccattcgattccatttgatgcctttcgactccattccgttccattccataccgtttgattccattccattcgattcatttcgatttgactccattccattccattccattcaattccattccactccatttcattccattccattccactccattctactccactccactaaactgcactccactgcactgcattgcattccattccattgcattcgattcaattgcactccattcctttctattccattccattccattccactgcattccaatccactccactccactccattcaatttcattccaccaaattacattccactccattccactccactccactttgctgcattccattcgattccaatagatcccattcgattccattcatatccattcctttccattccattccactctactccactccactcgacctcattcaattccattccattgcattccactccactccactccacttcaacacgttcaattaaattccattcccctccactcctttcaaatcctttccactgccctccattctatttcatgtcattccactccactcctctctactccactccactccattccactccagtccactccaatcctctccactccactccattccattccattccatagcattcctctcaactccactccactacactcccttaaattccattcgtttccacctcattccattctatgccattcctttcctctccaatccattccattccactccattccattccatcccactcgactgcattccattccactcccctcccctccattcctctccattccactccaatacactccactacactccaattcaatccacaccattccattccattccattgctttccactccactccactccattcaattccattacaccccattccattccactccgttccactccactccaccacattccattcgattcaattcgatgccatttcattccattcgatttgattccatttcattcaattcaattccatttcattccgttccattcaattgcgttacattcgattccattctatgcgattccattccatttgattccttcccgttcttttccaaaccattcaatttagttccattcgaaaccattccattccattccactccattccattccattaaactccactccactccaacctactccactccactccaatcccctgcaattcattccattccattccattgcactccactccactccactccattcaattccattccttcccattcctttccattccactccattccactccactccactccagtgctttccattccattccattttattccatgccactccattccattccactccactccactccaatccattccattccattgcattccaatccactccactccattccattcccttccttctgattccattccttcccattccactccattccaccccattccactccactgcactccactttattcaatacaattccacaccattccattcctctccattcgagtctactccactccacttcaccacattctattcctatatattagataccatttgattccattccttttgattccatttaattcaattcctttctattcgagtccattgcattcgagtccattccattcaagtccattccattcgggtccattcccttccggtccgttccatagtattccattccattccactccactccactccattcaattccactccactccacttttctacactcctgtccattccgttccattccattcctttccaacccattccattccactccattccattctattctattccaatccactccattccattccattctattccactccactccattccattccattccattccattccattccattcccctccattccattccaatccactccattccattccactctactccattccattccactcccctccagtcaactccaatcccctccattcctttccactgcattgcattccattgcaatttatccactccactccattccacttcattccattccattccacttctttccattcaactctactccactccactcaactccagtccactacactccattccattccattgcgttccactccactccattctgttcaattccattccttcccatttaattccaatccactgccttctactccactcctctccgttcaattccattgaacaccattccattccactccattccactccattccactccacttcaccgcattccgtttgattccattcggtgccattttattatattccattcgattatattccactcgattccattccgttacattccattccattagattccattccatttgattccaatccgttagattccattccattcgatttcattccatttgatgcctttcaattcgattcctatccatacatttccatgcaattcgtgactattacgttcgattccattccatttgagtccattcctttcgagtcctctcaattcgagtacgtgccattcgagtccattccacttgattccattccattccagtacattccattccaatcctttcaatgctacagctttccattccatttcattccaatcctttccactctactccactccactccattcctttccattccattctactgcattcgtctccaatccactctactcaactctactccaatcaattccattccttccccttccattccattccactccattccactccactccaattcactccattaaattcctttccaccccattccattgcactcttttccactccaattaactcgactaagtccatttgattccattagatgtcaatcgattatattgcattcaattccattccattcaatttcattccgttcgattctatttcatttgaatccattccattcgatccctttccattcaagcccattccattccagtccattccatcccactccgtttcaaccaagtccattctattcgagtccattccattttattcctttctattccattgcattccattccactccacatgactccattccgttccactccattccactccactacactccattccataccattccattcgcttccattccattccgttccattccactccactcaactccactccacttcactccactccactcctctctgctctgctccactccactccattccactccattccattccattgcattccattccactccattccactccactccactccgttcaattcccttcttccccattccattccattccactccattccactagaatccaagctactccattcagttttgttccaacccattccattccactcaattccattccactccactccagctcaccgcactctgttcgatcccattcaatgccatttgttgccattctattccattgcatttgattccattccattccattccattccattccattccattccattccattccataattccatttcattccattacattcctttccatccgattccattccttctgattccactccatttgatttcattccattccactccattccattcgagtccattcaattcatatatattcccttccagtccattccatttgagtccattcctttggagtccactgaattcgagtacttgccattcaagtccattccacttgactccattccattccaggccattccaatccaatccattacatgtccctgctttccattccattccattccattttgttccacttcactccactccattccattcctttctgttccattccactgcattcctctccactccactcaaatctactcctgtccattccattctgttccactccaatgcactccactccacttcactccattacatccctttccacgcctttccattccaatccctttaactcccattcactaagtccattcaattcctttcaatgccatttgattacattgcattcaattccattccatttgatttcattccttttggttccattccattcgaatcccttccattcgagcccatttcattcaagcccattccattccatcccactccgtttccttcaagttcattccattccattccattccattgtattccattctattacattgcattccatttcactccgctacactccattccttaccattccattcccttccattccattcccttccattcccttccattccactccactcatctccattccactccactccgctccactccattccattccattgcattcctttctactccattccactccactccactcctttcaataccattccttcccattctattccattccactctattccactacattccaagctactccattcagttccgttcgaacccattccattccactcaattccactccactctgcctcaccgcattctattcgttcccatttgatgccattctttgccatttgattccattgcattcgatgccattccattcgattccttttcatttgattccattccatccgattccactccatttgagtctattacattccagaccattccagtcgagtccattccattccagtccattccattcgagtccattcaattccagtccattccattccagttcattccattccattccattccattccacttcacaccattccattccactccactccacttcattcaattcaactccactccagtgtagtccactgcactccacttcattccattcctttccattgcattgcattccactcctctccaatcctctccactccattcaattccatttcttcccattccattccattccactccatgccaatccactccactccaatccattcaattccattccaccccattccattccactgtattccactccactccagttgacttcactgcattccattctattccattcaatgccattggatttgattccattcaattacattccaatcaattccattccattcgattcctttccattgcattccattgcattccattgcattccattccattccattcgtgtccattccattcgaatccattctgttctattccactctattccgttccattccattctactccgttccattccattcgattccaatccatttgagtccattccattcgattctattccattccagtccattcccctccagtccattccattcaagtccattccatttcattccattccattgcactccactccactccactcctgtccatcccaatacactccacttcactagactccacttcactcaattccattccattgcattccactccactccactcctttcaattccaatcattcctattcctttccattccacttcattaccctcaactcgactccactccattcaattccattcctccacattccattccactccatttcaacccactttactccacttcaccgcattcctttcaattccatttgatgccattcgattccattacattcgataccataccgtttgtttccattccattccatttctttccattccattcaataccattccattcaattcctttccattcgattccattccattcgatgccattccattcaattccattccatttgattccatcccattcggttccattccatttgattccattccattcgtttccattccattcaagtccattccaatttattgcattccattccattccattccactccattacattctattactttgcattccactctgctccactccactacactccactttgttcaattccattctgtcccattccattgaattccattccgttccattcctttccattccattccattcctttctactccactccattccacgacattccactccattccactccattgcattcatttacattacacaccactccactgcattccgctactttccactccactccaatccactccacaccgttcaattccattccctcccattccattcaattcccttccattctacaccagtccactacaatccattcaaatccattccaccccactgcattcccatcctttccactccactgcacttcacttcaccgaattccattcgattccatttgatttgattcaattccattctattacattctattcgactccattccattccattccattccattccactccactaaattccattccattcctttcctttccactcaattccattccattccattgcattccactctactcctcggcactccactccactccactccattcaattccattctattgctttccactccactccactacgttcaattccattccttctcattccataccattcaactccattccactccactccactccactgtattcaattccattccacacattccattcctctcctttccaatccactccactccaattcaccaaattccatttgatttcattccattccattctattccattccattctattccattccattccattcaattcgattccattacattctattccattccactttattccattccatttgagtacattccattctattccattccatgcctttccgttgcactccactccactccactccactccattccactccattccactccactctcctccattccattccactccattgcatttaactccagtccagtccactccactcgattcaatttcgttacttcccattcctttccattccactctattccactctactccactacattcaattacattacccgcattccattcaactccattccactccactgcactctactataccacattccattcaattccatttgatgtcattcgattccattccgattgattccatttcatccgattccattgcattctatttcattgcattctattccactctgttcgattccattccgttcgagtccattccattccagtccattccattcgtgtccattccattccagtccagtccattccattccagtccattccattcgtgtccattccattccagtccattctattccagtccattccattcaagtcccttccattccattcgtgtccattcctttactatccattccattccattgcaatacattccactccactccactccactccactccattcagttcctatccttcccattccattacattccactccattccactccactccacaccaccacattcaattccattccaccaaattcccttcaactccattccactcccctcctctccactttaccatattccttttgatttcatttgatgacattcgattccattcaattcgattccattccattcgattctattccattcaatcactttcgatttgattcctttccattccattccttttcattacatcacattaaattttattcacttccatatgattccattccattctatttgattcgattccattccattacattatgtttgattccattccattcaattccattccattcgagtccattccattcatgtctgttccattccagtccattctattcgagtccactccatcccacttcattccattagagtccatacctttccattccattgcattctattccattccactccactccactcctttccactctactccactccattccattccattccactccattccattccacttcactccacaccatcctaacccactccagaccattccgttcctatcttttccattccattttactcaattgcattgcattccattccattccattccattgcattccattccactccactctactccagtcccctccattcaataccattccttcccattccatttcattccactccattccactccactcctctccattacattcaattccattccaccctattctattccactccattccacttcactcctctccaattcaccgcattccattcgattccattcgatgccatttcattccattccattcaattccattccatgcgattccattcactactattccatttgatctcattccattcaaagccattccattccattcgattccattccattccattatatttgattccattccattagcgtccattttatttgagtgcattccatttaagtcctttccattccagtccattctataccagttcatttcatatgagtccattttattcaattccattctattccattccactcccctccacacctctcctctccactccactccattccatccattccattacattccactccactccgctccactgcactcctttcaattccattccttaccattccattccattcgccgccactccaatacactctactctattccattccactccattccattccactccattccactttgctccaattcagtttgccacattccatttgattccattcgattctggttgattctaatccattcaattatattgcattcgattccattccctttgggtccatccattctagtccactccaattctttctattccattccactctgttgaggcctattttggaaaaggaaatatcttcacataaaaactacacagaagcattctgagaaacttcttcatgagttgtgcattcaactcacagagttgaacttatcttgtcactgagcacttttgaatctctctttttgtagaatctgcaagtggatattttgagccctttgtgccctatggtggaataggaaatatcttcaaataaaaactacacagaaccattcagagaaacttctttgtgatgaatgcattcctcacacagagttgaaactttctttttattgagcagttttgaaacaccctttttgcagaaagaccaattggatatttggagagttttgaggcctattgtgtaaaaggaaatatcctcaaataaaaactatcccagaagcattctgagaaacttcattgtgatgtgtgcattcaactcacagagatgaacctatcttttgactgagcagttttgaatctctctttttgtagaatctgtaaggggatatttggagccctttgtgccctattgtgtaaaaggaaatatcttcatataaaaactacacagaagcattcagagaaacttctttgtgatgaatacattcctcacacggagttgaacctttttttttattgagcagttttgaaacatcctttttgaagaatgacctagtggatatttgcagagtgtggggcctattgtggaaaaggaaataccttcacattaaaactacgtggaagcattctgagaaacttgtttgtgatgagtgcattcatcacacagagttgaacctttatttttattgagcagttatgaaacactctttttgcagaaccagcaagtggatatttggagagctttgaggcctgttgtggaaaaggaaatatcttcaaataaaaactacactggaggaggagccaagatggctgaataggaacagctccagtctacagctcccagcgtgagagacgcagaagacgggtgatttctgcttttccatctgaggtaccgggttcatctcactagggagtgccagacagcagatgcaggacagtgggagcagtgcacagttcatgagctgaagcagggtgaggcactgcctcactcggcaagtgcaaggggtcagggagttccctttccgagtcaaagaaaggggtgacggacgcacctggaaaatcgggtcactcccacccgaatattgcgcttttcagaccggcttaaaaaacggcgcaccacgagactatatcccacacctggctcagagggtcctacgcccacagaatctcgccgattgctagcacagcagtctgagatcaaactgcaaggcggcagcgaggctgggggaggggcgcccgccattgcccaggcttgcttaggtaaacaaagcagctgggaagctcgaactgggtggagcccaccacagctcaaggaggcctgcctgcctctgtaggctccacctctggaggcagggcacagacaaacaaaaagacagcagtaacctctgcagacttaaatgtccctgtctgacagctttgtagagagcagtggttctcccagcacgcagctggagatctgagaaccagcagactgcctcctcaagtgggtccctgacccctgaaccccgagcagcctaactgggaggcacccccccgcaggggcacactgacacctcacacggcagggtattccaacagacctgcagttgagggtcctgtctgttagaaggaaaactaacaaagagaaaggacattcacaccgaaaacccatctgtacatcaccatcatcaaagaccaaaagtagataaaaccacaaagatggggaaaaaacagaacagaaaaacgggaaactctcaaatgcagagcgcctctcctcctccaaaggaacgcagttcctcaccagcaacggaacaaagctggatggagaatgactttgacgagctgagagaagaaggcttcagacgatcaaattactctgagctatgggaggacattcaaaccaaaggcaaagaagttgaaaactttgaaaaaaatttagaagagtgtataactagaataaccaatacagagaagtgcttaaaggagctgatggagctgaaaaccaaggctcgagaactacgtgaagaatgcagaagcctcaggagctgatgcgatcaactggaagaaagggtatcagcaatggaagatgaaatgaatgaaatgaagcgagaagggaagtttagagaacaaaggataaaaagaaatgagcaaagcctccaagaaatatgggactatgtgaaaagaccaaatctacgtctgattggtgtacctgaaagtgacgcggagaatggaccaagttggaaaacactctgcaggatattatccagaagaacttccccaatctagcaaggcaggccaacgttcagattcatgaaatacagagaacgctaaaaagatactcctcaagaagagcatctccaagacacataattgtcagattcaccaaagttgaaatgaaggaaaaaatgttaagggcagccagagagaaaggtcgggttaccctcaaagggaagcccatcagactaacagtggatctctctgcagaaaccctacaagccagaagagagtgggggccaatattcaacattcttaaagaaaataattttcaacccagaatttcatatccagccaaactaagcttcataagtaaaggagaaataaaatactttacagaccagcaaatgctgagagattttgtgaccagcaggcctgccctaaaagagctcctgaaggaagcgctaaacatggaaaggaacaactggtaccagccgctgcaaaatcatgccaaaatgtaaagaccatcgagactaggaagaaactgcatcaactaacgagcaaaatccccagctaacatcataaggacaggatcaaattcacacataacaatattaactttaaatgtaaatggactaaatgctccaattaaaagacacagactggcaaattggataaagagtcaagacccatcagtgtgctctattcaggaaacccatctcacgtgcagagacacacataggctcaaaataaaagaatggaggaagatctactaagcaaatggaaaacaaaaaaaggcagggattgcaatcctagtctctgataaaacagactttaaaccaagaaagatcaaaagagacaaagaaggccattacataatggtaaagggataaattcaacaagaagagctaactatcctaaatatatatgcacccaatacaggaggacccagattcataaagcaagtcctgagtgacctacaaagagacttagactcccacacattaataatgggagactttaacaccccactgtcaacattagacagatcaaggagacagaaagtcaacaaggatacccaggaattgaactcagctctgaaccaagtagacctaatagacatctacagaactctccaccccaaatcaacagaatatacatttttttcagcaccacaccacacctattccaaaattgaccacatacttggaagtaaagctctcctcagcaaatataaaagaacagaaattataacaaactatctctcagaccacagtgcaatcaaactagaactcaggattaagaatctcactcaaagccactcaactacatggaaactgaacaacctgctcctgaatgactactgggtacataacgaaatgaaggcagaaataaagatgttctttgaaaccaatgagaacaaagacacaacataccagaatctctgggacgcttcaaagcactgtgtagagggaaatttatagcactaaatgcccacaagagaaagcaggaaagatccaaagttgacaccctaacatcacaattaaaagaactagagaagcaagagcaaacacattcaaaagctagcagaaggcaagaaataactaaaatcagagcagaactgaaggaaatagagacacaaaaaacccttcaaaaaatcaatgaatccaggagctggttttttgaaaggatcaacaaaattgatagaccgctagcaagactaataaagaaaaaaagagagacgaatcaaatagacaaaataaaaaatgataaaggggatatcaccacccatcccacagaaatacaaactaccatcagagaatactacaaacacctctacgcaaataaactagaaaatctagaagaaatggatacattcctcaacacatacactctcccaagactaaaccaggaataagttgaatctctgaatagaccaataacaggagctgaaattgtggcaataatcaatagtttaccacccaaaaagaatccgggaccagatggattcacagccgaattctaccagaggtacaaggaggaactggtaccattccttctgaaactattctaatcaatagaaaaagagggaatcctccctaactcatttaatgaggccagcatcattctaataccaaagccaggcagagacacaaccaaaaaagagaattttagaccaatatccttgatgaacattgatgcaaaaatcctcaataaaatactggcaaaccgaatccagcagcacatcaaaaagcttatccaccatgatcaagtgggcttcatccctggggtgcaaggctggttcaatataagcaaatcaataaatgtaatccagcatataaacagagccaaagacaaaaaccacatgattatctcgatagatgcagaaaaagcctttgacaaaattcaacaacccttcatgctaaaaactctcaataaattaggtattgatgggacgtatttcaaaataataagagctatctatgacaaacccacagccaatatcatactgaatgagcaaaaactggaagcattccctttgaaaactggcacaagacagggatgccctctctcaccgctcctattcaacatagtgttggaagttctggccagggcaaataggcaggagaaggaaataaagggtattcaattaggaaaagaggaagtcaaattgtccctgtttgcagatgacatgattgtatatctagaaaactccactgtctcagcccaaaatctccttaagctgataatcaacttcagcaaagtctcaggatacaaaatcaacgtgcaaaaatcacaagcattcttatacaccaacaacagacaaacagagagccaaatcatgagtgaactcccattcacaattgcttcaaagacaataaaatacctaggaatccaacttacaagggatgtgaaggacctcttcaaggagaactacaaaccactgctcaatgaaataaaagaggatacaaacaaatggaagaacattccatgctcatggctaggaagaatcaatatcatgaaaatggccatactgcccaaggtaatttacagattcaatggcatccctatcaagctaccaatgactttcttcacagaattggaaaaaactactttaaagttcatatggaaccaaaaaagagcccgcatcgccaagtcaatcctaagccaaaagaacaaagctggaggcatcacactacctgagttcagactatactacaaggctacagtaaccaaaacagcatggtactggtaccaaaacagagatataggtcaatggaacagaacagagccctcagaaataacaccgcatacctacaactatctgatctttgacaaacctgagaaaaacaagcaatggggaaaggattccctatttaataaatggtgctgggaaaactggctagccatatgtagaaagctgaaactggatcccttccttacaccttatacaaaaatcaattcaagatggattaaagatttaaacattagacctaaaaccataaaaaccctagaagaaaacctaggcattaacattcaggacataggcatgggcaaggacttcatgtccaaaacaccaaaagcaatggcaacaaaagccaaaattgacaaatgggatctaattaaactaaagagcttctgcacagcaaaagaaactaccatcagagtgaacagacaacctacaaaatgggagaaaattttcacaacctactcatctgacaaagggctaatatccagaatctacaatgaactcaaacaaatttacaagaaaaaaacaaacaaccccatcaaaaagtgggcaaaggacatgaacagacacttctcaaaagaagacatttatgcagccaaaaaacacatgaaaaaatgctcatcatcactagccatcagagaaatgcaaatcaaaaccacaatgagatactatctcacaccagttagaatggcaatcattaaaaagtaaggaaacaacaggttctggagaggatgtggagaaataggaacacttttacactgttggtgggactgtcaactagttcaaccattgtggaagtcagtgtggcgattcctcagggatctagaactagaaatagcatttgacccagccatcccattactgggtatatacccaaaggaatataaatcatgctgctataaagacacatgcacatgtatgtttattgcggcactattcacaatagcaaagacttggaaccaaccgaaatgtccaacaatgatagactggattaagaaaatgtggcacatatacaccatggaatactatacaggcataaaaaatgatgagttcatgtcctttgtagggacatggatgaaattggacatcatcattctcagtaaactatcgcaagaacaaaaaactaaacaccgcatattctcactcataggtgggaattgaacaatgagatcacatggacacaagaaggggaatatcacactctggggactgtggtggggttgggggaggggggagggatagcattgggagatatacctaatgttagatgacgagttagtgggtgcagcgcaccagcatggcacatgtatacatatgtaactaacctgcacaatgtgcacatgtaccctaaaacttaaagtataataataataaaaaaaactgcactgaaacattctgagaaacttctttgtgatgtgtgcattcatatcacaggtttgaacctaacttatgattgagcagttttgaaacactctttttgtggaatctgcaagtaaatgtttggagcggtttgaggcctattgtagaaaaggaaatatcaacaaataaatactacacagaagcattcagaaaaacttctttgttgtgagtgcattcatcacacagatttgaacctttcctttgactgaacagttttgagacactctttttgcagaatctgcaagtgcatattttaggactttgaggacagttgtggaaaaggaaatatcttcacataaacactacacagaagctttctgagacacttcttcgtgatgtgtgcattcacctcactgggttgtacctgtcttatgattgagcagtttagaaccgctgtttttgtagaatatgcaagtgtatatttggagcacattggggcctaccgtggaaaaggaaatatgttcacataaaaactacacagaagcattctgagaaacttctttttgatgtgtgcattcatttcacagagatgaacctttcttttgattgagcagttttgaaacactatatttgtagaatctacaagtggatatttggagagctttgagtcctattttggaaaaggaaatatcttcacataaaaactacacagaagcattctgagaaacttctttgtgaggtgtgcattcaactcacggatttgaacttttctcttcattgagcacttttgaatctctctttttctagaatctgcaagtggatatttggagctctttgcaccctgtgttggaaaaggaaatatcttcaaataaaaactacacataagcattctgagaaacttctttgtgttgagtgcattcatcacacagagttgaacgtttcctttgattgagcagttttgaaacgctcttttcgtagaatctggaagtggatatttggagggctttgaggccaattttggaaaagaaaatatcttcacataaaaattacacatagacattctgagaaacttcttttttatttgtgcattcaactcacagagttgaatctatcttttgattgagccgtttggaatctctcttttgtagaatctgctagtgaatatttggagacctttgtgccctattgtggaaaaggaaatatcttcaaataaaaactacacggaagaattctgggaaacttctttgtgatgtgtgcattcaggtgacacgtttgaacctatcttatgattgagcagttttcaatctctctttttgtagaatatgcaagtggatatttggagccctttgcaccctatggttgaaaaggaaacatcttcaaatacaaactacacagaagcattcagagaaacacctttgtgatgactgcattgatcacaaagagtttaaagtttcttttgactgagcagttttgatacactctttttgtagaaactcaaagtaactatttggagggctttaaggcctattttgggaaaggatatatcttaacataaaaactgcacagaattattctgagaaactcctttgttatgtgtgcattcaacacacagagttgagcctatcttttgattgagcagttttcaatctctctttttgcagaatctgcaagtggatatttgtagcactttgaggcctactgtggaaaagcaaatatcttcaaataaaaactacacagaagcattctgagaaacttttttgtgaggtgtgcattcaacccacagactcgaatctttcttttgattgagcagttttcaatctttctgcagaatctgcaagtggatatttggagtgctttgtggcctattgtggaaaaggaaatatcttcaaataaatactacacagaagaattctgggaaactactttatgatgtatacattcagctcacaagtttgaacctatcttatgattgagcagttttgaatctctctttttgtagaatctgaaagtggatatttggagcccttgcatcccatgggggaaaaggaaatatcttcaaataaaaactgcacagcagcattcagaggaactcctttgtgatgagtgcattcatcacaaagagttcaaagtttcttttgattgagcagttttgaaacactctttttgtagaatctcgaagtagctatttggagggctttgaggcctattttggaaaaggatatatcttaacataaaaactacacataattattctgagaaactactgtgttatgtgtgcattcaacacacagagttgaacctatcttttgattgggcagttttgaatctctctttttgcagaatctgcaggtcgatatttgtagcgttctgagacctactgtggaaaagcaaatatcttcaaataaaactacacagaagcattctgagaaacttttttgtgaggtgtgcattcaactcacagagtcaaaccgatcttttgattgggcagttttgaatctctctttttgcagaaccagcaagtggatatttggagtgctttgaggcctatagtggaaaaggaaatatcttcacataaaaactacacagaggcattctgagaaacttccttgtgatgtgtgcattcaactcacagagttgaacctatcttttgattgagcagtttagaatctctctttttgcagaatctgcaattggatatttggagcgatttgaagcctattgtggaaaaggaaatatcttcacataaaaactacacagaggcattctgagaaaacactttgtgatgtgtgcattcaactcacagagttgaacctatcttttgattgagcagttttgaatctctctttttgtagcatctgcaggtggatatttggagccctttgtggcctacagtggaaaagaaaatatcttcaaataaaaacaacacagaatcattccgggaaacgtttttgtgatgagtgcattcatcccaaagggttgaatctttctattgactgagtaatttggaaacactctttttgtagaatctgaaagtggatatttgaaaagctttgtggtctattttggaaaaggaaatatcttcagataaaaactacacagaagctttctgggaaacttcattgttagatgtgcattcaagtcacagattttaacctatcttttgatagagcagttttgaaactctctttttgtagaatccgcaagtggatatttggagctttttgtggcctatgttagaaaatgaaatactctcacataaaatctatacagaaactatctgagaaatctgtttgtgatgtgtgcgttcatctcaaagagttgaacctttcttttgattgagcagtttggaaacactctttttgtagaatgtgcaagtggacatttggagcgccttgtggcctatggtagaaaaggaaatatcttcacataaaatctagacacaagcaatctgagaaacttctttgtgatgtgtgcattcatctcacagagtgaaatctttcttttgatagagcagttttgaaacactctttttgcagaatctgcaagtggacatttggagcgctttgtggtctttggtggaaaaggaaatatcttcacataaaatctagacagaagcaatctgagaaacttctttgtgatgtgtgcgttcatctcacagagttgatcttttcttgatggagcagatttggaactctctttttgtagtatctgcaagtggaaaatgggagtgccctatggccttttgtggaaaataaattatcttcacttaaaaactacacaggagaattctgagaaacttctttgtgatgtgtgcattcatctcactgagttgaaacttttttttgattgaacagtgtggaaacactctttttgttgaatctgcaagtggacatttggagtactttttagcatatggtagaaaaagaaatatcctcacataaaatctatacagaagcaatctgtgaaacttctttgtaatgtgtgcattcatctcacagagttaaaaatttcttttgatagagcaattttgaaactctcttttgtagaatctgcaagtgagcatttggagcacttaaaggcctatggtggaaaaggaaatatcttcacataaaaactagacagaagaattctgagaaacttctttgtgatttgtggcttcatctcacagagttgaacctttcttttgattgagcagtttggaaacactattttgtacaatctgcaagtggatatttggaacgctttgcggcctaaagtagaaaaggaaatatctttacataaaatctagaaagaagcaatctgagaaacttatttgtgatgtgtgcattcatctcacagagttaaacctttcctttgattgaaaagtcttgaactctctttttgaaggatctgcaagaggacatttgtagcactttgcggccgacgttagaaaaggaaatatcttcacataaaatctagacagaagcaatctgaggaacttctttgtaatgtgtgcattcatctcacagaggtaactctctcttttgtctgagcagttctgaaactctcttttgttgaatctgcaagatgacatttgggacgctttgacgccaatagtggaaaaggaaatatcttcacataaaaactagatagaagcattctgagaaagtttttgtgatatgcacaatcatctcccagagtcgaacctttccattgatggaccagttttgaaacactctttgtttagaatctgcaagtggacatttcaagcgccttgaggcctgtggtggaaaatgaaatatcttcacataaaaactagacagaagaattctgagaaacttcttggtgatgtgtgcattcgtctcacagagttgaacctttcttttgatttagcagtatggaaacactctttttgtataatttgtaagtgaatatttggagcactttgcagccaatggcagaaaatttaatatcttcacataaaatctgacagaagcaacctgaaaatcttctttgtgatgtgtgcattcacctcaaagagctaaacctttcttttgattgtggagttttgaaattctctttttgtagaatctgaaagtggatatttggagggctttgtggcctatggtggaaaaggaaatatcctcacataaaaactaagcagatgtatacagataaatatctttgtgatgtctgcattcatctcatagaggtaagcctttcttttgactgagcagtttggaaacaaacttttttgagaatccacaagtggacattttgtgcgctttgtggcctattgtagaaaaggaaatatcttcacataaaatctagacagaagcaatctgagcaatttctttgtgatgtgtgcattcatctcacagagttgaatctttcttttgattgagcagtttggaaacactctttttgtaggatctgcaagtggacattaggagcactttgaagcctatggtagaaaaggaaatatcttcacataaaatctagacagaagcaatctgaaaatcttctttgtgatgtgtgcattcatctgacagagttaaaccttttcttttgatagattagttttgaaactgtctttttatagaatctgcatgtggacatttggagcgttttgagatctattgtggaaaaggaaacatcttcacatgaaaactagagagaagaattctgagaaacttctttgtgatgtgtgcgttcatctcagagttgaacgtgtcttttgagggagcattttggaaacactctttttttcaaaactgcatgtagacacttggagcgatttgcagcctatggcagaaaaggaaatatcttcacataaaatctagacagaacaaatctgagaaacttctttctgatgtgtgcattcatctcagagagttaaacctttcttttgattgaggtgttttgaaactctctgtttgtagaatctgcaagtggacattttgaacgatttgaggcctatagtgggaaaggaaatatctccacataaaaactagacagaagaattcttagaaacttcttcatgatgtgggcgttcatctcacagagttgaagctttcttttgttgagcaacttggaaacattctttttgtagaatctgcaagtgcacatttggaacgctttgcggcctgtggtagaaaaggaaatatcttcacataaaatctagacagaagtaatctgagaaacctctttgtgatatgtgcactcacctcacagagtttaaccattcttttgtttaagcagttttgaaactctttttgcagaatctgcaagtggacgtttggagtgctttgaggcctatggtggaaaaggaaatatctttacataaaaactagaaagaagagttctgagacaatactttctgatgtgtgcatttatctcacagagttggacctttcttttgattgagtagtttggaaacactctttttgtagaatctacaagtggacatttggagcactttgcagcctgcggtagaaaaggaaatatcttcacataaaaactagacagaagatttctgagaaacttctttgtgttgtgtgcattaatctcacagaggtaaatctttcttttgattgagcagttttgcaactctctttttgtagaatctgcaagtggacatttggagggctttgaggactaaggtggaaaaggaaatatcttcacataaaaactagacagaagaattctgaaaaacttctttgcgatgtgtgcattcatctcacaggattgaacctttcttttcattgagcagttttgaaacactctttttgtagaatctgcaagtggatatttcgagaaccttgaggcctatggtagaaaagggaatatcttcacataaaaactagacagaagaattcagagaaacttctttgtgatgtatgcgttcatctcacagagttgaacctttcttttggtggtgcagtttggaaacactctttatgtaggatctgcaggtggacattgggagcactttgtggcctatggtagaaaaggaaatatcttcatataaaatctaaacagaagcagtctgagaaacttcttggtgatgtaggcattcatatcacagaggtaaacttttcttttgattgagcagttttgaaacactctttttgtagaatctgcaagtgaacttttggagcactttgatgcctatggtggaaagttaatatcttcacataaatctagacagaagaattctgagaaacttctttgtgatgtgggggttcatctcacgtagttgtacctttcttttgattaagcagtttgtaaacactctatttttagaatctgcaagtggacaattgaagcgatttgcatgcagcctatggtagaaaaaggaaatatcttcacatgaaatctagacagaagcaacctgagaaactatattgtaatgtgtgcatgcatctcagagagttaaacatttcttttgattgagcagtttttaaactctctttttgtaggatctgcaattcaacatctggagcgctttgacgcctatggtggaaaagaaaatatcttcacataaaaactagacagaagaattctgagaaactactttgtgatgggtgcgttcatctcacagcgttgaacttttcttttgattgagcagttgtgaaacactatttttggagaatctgcaagggaaatttgaagagcttagagacctatggttgaaaaggaaatgtcttcacataaaaactacatagaatcattctgagaccttcttagtgatgtgtgcattcatctcccagagttgaaactttcttttgatggacctgtttggaaatacttttttgtagaatctgcatgtggacttttcgagtgccttgacgcctatggtggaaaatgaaatttctacacataaacactagacagaagaattctgagaaacttctttgtgatgtgtgtgttcatctcacagagttgaacatttcttttgattgagcagtttgaaaacactcattttgtaggatctgcaagtggagatttggagcgctttgcagcctatggtagaaaaggaaatatcttcacataaaatctagacagaaacaatctgagaaacttctttgtgatgagaacattcatctcacagagttaaaccttactttagattgagcagttttgaaaatctctttttgcagaatctgcaagtggacatttggagcactttgaggcctatggtctgaaaagaaatacctttacatgaaaacaagatagaagaattctgagaaacttctttgtgatgtgtgcgttcatctcacagagttgaaactttcttttgattcagcaatttggaaacactctttttgtagaatctgcaagtggacatttggaacgctttggggcccatggtggaaaaggaaatatcttcacataaacactaggcagaagaattctgagaaacatctttgtgatgtgtgcattcaattgacagagttgaatctttgtttgagcagtttggaaacactctttttatagaatctacttttggacatttggagcgctttgtgacctatggtagaaaaggaaatatcttcacataaaatctagacaaaagcaatctgagaaacttccttgtgatgtgtgcattcatctcatagagttaaacccttcttttgactaagcagttttgaaactctccttttgtagaatctggaagtggacatttagagcactttgaggcctattgtggaaaagggaatatcttcacataaatactagacagaagaattctgagaaactttttgcgatgtgtgcattacctcacagagtagaacctttcttttgattgagcagtttggaaacactctttttgtagactctgcacgtagatatttggagcaccttgtggcccgtgttagaaaaggaaatatcctcacataaaatctagaccgaagcaatctgggaaagttctttgtgatgtgtgcattcataacacagaggtaaacctttcttttgattgaacaactttttttcttttgattgaacaactttttgattgtacagagtttgatttgaaactctctttttgtagaatctgcaagtggacatttacagagctttgagatctactgtggaaaaggaaatatcttcacataaatactagacagaagaattctgagaaacctctttgtgatgtgtgcattacctcacagagttgaacctttcttttgattgagcagtttggaaacagtctttttgtagaatatgcaagtggacattttgagcaccttgcagccatgttagaaagggaagtatcttcacataaaatctagacagaagcaatctgagaaagttctttgtgatgtgtgcattcataacacagaggtaaacctttcttttgtttgaatagttttgaaactctctttttgtggaatctgcaagtggacatttacagcgctttgaggcctattgtggaaaaggaaatatcttcacataaatactagacagaagaattctgagaaacttctttgtgatgtgtgcattacctcacagagttgaacctttcttttgattgagcagtttggaaacactctttttgtagaatctgcaagtggacatttggagcaccttgtggcccatgttagaaaaggaagtatcttcacataaaatctagacagaagcaatctgagaaacatctttgtgatgtgggcattcatctcacagtgttaaatacttgttttgattgagaaatttttagactctctttttgtagaatatgcaagtgaacatttgaagagctttgaggactatggtggaaaaggaaatattttcacataaaaactagacagaaaaattctgagaaacttccttgttatgtgtaagttcatctcaccgagttgaatcttttgatacagcagtttggaaacactcttcttatagattcttatagattctgctagcggacatttgagtactttgctgcatatggcagaaaaggtaatatcttcacgtaaaatctatacagaagcaatctgagaaacacctttgtgatgtgttccttcaactcaaggagttaaacatttcttttgattgaggagtttcgaaactctctttttgtcgaatctgcaagtgaacatttggagcgctttggggcacatggtggaaaaggaaatatcttcacataaaaaataggcagaagaattctgagaaacttctttgtgatgtgtgcattcatttcacagaattgagtcttttctttgattgagcagtttggaaacactctttttatagaatctacttttggatatttggagcgccttgcggcctatggtagaaaaggaaatatcttcacataaaatctagacaaaagcaatctgagaatcttctttgtgatgtgtgcattcatccatagattttatgtgaatatatttccttttctagcataggccacaaacactccaaatgtccacttgcagattctacaaaaagagtgtttccaagcagctcaatcaaagaaagatccaactctgtgagatgaacgcacacatcacaaagtagtttctcagaaatcttatgtctaatttttatgtgaagatatttcattttccaccataggcctcaggcactggaaatgtccacttgcagattctaccaaaagagtatttcaaaactggtccatcaaaagaaaggttcaactcagggaaatgaatgtaaacatcacaaagcagtttctcagaatgcttctatctagtttttctgtgaagatatttccttttccacaataggcctcaaagtactccaaatgtctacttgcagatattacaaaaagagaatttcaaaaatgctcagtcaaaagaaaggattaactctgtgagatgaatgcacacatcacaagagtgtttctcagacgacttctgttgagattttttgtgaagatatttccttttctaccacaggtcgcaaagcgctccaaatgtccacttgcagattctagaaagagtgtttccaaactgcttaatcaaaagaaaagttcaagtctgtgagatgactgcatgcatcacaaagaagtttctcagaattattctgtctagtttttctgtgaagatatttccttttcctccacaggcctcaaacggctcaaaaggtacacttgcagattctacaaaaatagagtttcaaaactgctcaatcaaaagaaaggtttaactgtgtgaaatgaatgcacatatcacaaagaagtttctcagattgcttctgtctagattttatgtgaagatatttccttttctaccataggcctcaaatcgctccaaatgtccacatgcagattctacaaaaagattgtttccaaactgcccaatcaaaagaaatattcaactctgtgagatgaatacacacatcacaaagaaggttctcagaattcttctgtcaagtttttatgtgaagatatttccttttccaccttaggcctcaaagctctccaaatgtccacttgcagatactacaaaaagagagttttaaaactgcacaatcaaaagaaatgtttaactctgtgagatgaattcacacatcacaaataagtttctcagattgcttctgtctagatttcatgtgaagatatttccttttccaccaaaggctgcaaagctctccaaatgtccactttcagattctgcaaaaagagtgtttccaaactgctcaataaaaagaaaggttgaactccttaagatgaaggcacacatcacaaaaaagtttctcagaattcttctgtctactattgatgggaagatatttcctattccaccattggcctcaaagccctccaaatgtccacttacagattctacaaagagattttcaaaactgcttaatcaaaagaaatgtttaactctgtgacatgagtgcacacatccaaagaagtttctcggattgtttctgtctagattttatgtgaatatatttccttttctaccataggccacaaagcactccaaatgtccacttgcagattctacaaaaagagtgtttccaaactgctcaatcaacaaaaaggttcaactctgtgagatgaacgcacacatcacaaagtagtttctcagaattcttatgtctagtgtttatgtgaagatatttcgttttccacaacaggcctcaaggaactggaaacgttcacttgcagattctacaaaaacagtatttcaaaactggtcaatcaaaggaaatattcaactgtgggaaatgaatgtgcacatcacaaagcagtttctcagaatgcttttatctagtttttatgtgaagatatctccttctccacaataggcctcaaagcgccccaaatgtccaattgcagatactacaaaaagagagtttcaaaattgttcaatcaaaagaaagcgttaactctgtgagaagaatgcatacatcacaaagaagtttctaatattgcttctgtcgagatttttttgtgatgatattcccttttctaccacatgcggcaaagcgctgcaaatgtccacttgcagattctagaaagagtgtttccaaactgcttaatcaaaagaaagtttcaactctgtgagatgaacacatgcatcacacagaagtttcacagaattcttctgtctagtctttctgtgaagatattttcttttcctccacaggcctgaaagtgctcaaaatgtccacttgcagattctacaaaaatagagtttcaaaattgctcaatcaaaagaaaggtttaactccatgaggcgaatgcacacatcacaaagaagtttctcagattgcttctttctagattttatgtgaagatatttccttttgtactaataggctgaaaagcgctacaaatgtacacttgcagattccacaaaaagattgtttccaaactgttcaatcaagagaaaggttcaactctgtgaggtgaatgcacacatcacaaagaaatttgtcagaatacttctgcctggtttttatgtgaagatattaccttttccatcatatcgctcaaagcgctccaaatgtccacttacagattctacaaaaagagagtttcaaaactgctctatcaaaacaaaggtttacatctgtgagatgaatgcacaaatcaaaagaagtttctcagattgcttctgtctagatattatatgaagatatttcctttcctaccataagctgcaaaacgctccaaatgtccacttacagattctataaaaagagaatttcaaaactgctcaatcaaaagaaagttttaactctgtgagatgaatgcacccatcacaaagaagtttctcagattgcttctgtctagattttatgtggagatatttccttttccatcatagactgcaatgcgttccaaatgtccacttgccgattctacaaaaagagtgttttcaaactgctaaatgaaaagaaaggttcaactctgtgagatgaatgcaaagatcacaaagaagtttctcagaattcttctgtctagtttttagtgtgaagacatttccatttccactataggcctccacgtgctccaaatgtccacttgcagattctacaaaaagagtgtttcaaactgctcaatcaaaagaaaggttcaagtctgtgagataaatgcacacatcacaaagaagtttgtctgaattcttctgtctagttttcatgagaagatacttcctttttcaccataggcctgaaagcactccaaatgtcctcttacagatttgacaaaaagagagtttcaaaactgctcaatcaaaagaaaggtttaactatgtaagatgaatacaaacatcacaaagaagtttctcagattgcttctgtctagattttaagtgaaaatatttccttttctatcataggccacaaagcactccaaatgttcacttgcagattttacaaaaagagagtttcgaaactgctcaatcaaaggaaaagtttcactccgtgagaagaatgcacacatcaaaaagaatattctcagactacttctgtctagattttatgcgaagatatttccttttctaccatagaccgcatagctctccaaatgtgcacttgcagattctacaaaaagagtgtttccaaactgctcaatcaaaagaaaggttcaactctgtgagaagaacgcacacatcacaaagaagtttctcagaattcttctgtctagtttttatgtgatgatatttccttttgcaccatgggcctcaaagcgctccaattgtttacttgaagattctacaaaaagagagtttcaaaactgatcaatcaaaagaaaggtttaactctgagatgaatgcacacatcacaagtaagtttctcacattgcttttgtctagattttatgtgaagttatttacttttctactatgggacacaaagtgctctaattgtccacctgtagattctacaaaaagagtatttccaaactgctcaatccaaagaaagactcaactctgtgaaatgaactcacacatcacaaagaagtttcttaggattcttctgtttagtttttatgtgatggcatttccttttccaacataggattcagagtgctccaaatgtccacctgcagattctgcaaaaagagagtttctaaagtgctcaatcaaaagagaggcttaactctgtgagatgaatgcacacattacaaagaagtttctcagattgtttcggtctagattttatgtgaaaatatttccttttctatcataggccacaaagcactccaaatgtctacttgccgattctacataaagagtgtttccaaactgctgaatcaaaagaaaggttcaattctgtgagatgaatgcacacatcacaaagcagtttctcagaattcttctgtgtagtttttatgtgaagatatttccttttcaaacataggccttaaggcgctcaaaatgtccacttgcacattctataaaaagagtatttcaaaactggtcctttgaaagaatgtttcagctctgggagatgaatgcacatatcacaaagaagtttgccagaatgcttctatcaagttttcatgtgaagacatttcctcttctaccataggcctaaaagtgctccaaatgtccacctgcagattctacaaaaagagagtttcaaaacttctcaatcaaaagaaagggttaactctgtgagatgaatgcacacatcacgaagaagtttctcagattgcttctttctaaatttgatgtgtagatattccgtttttaccattcgctgcaaagcgcaccaaatgttcatttgcagattctagaaaaagagtttttccaaactgctcaatcaaaagaaaggttcaactctgtgagattaacacacacatcacaaagaagtttcccagaattcttctgtctagtttttatgtgaagatatttccttttccaccacaggtctcaaagtgctccaaatgtccacttgcaaattctatgaaaagagattttcaaaactgctcaaccaaaagaaaggtttaactccgttagatgaatgcacacatcacaaaggagtttctcagattgcttctgtctagattttatgtgaagatatttccttttctaacataggccacaaagcgttccaaaagtccacttgcagattctacaaaaagagtgtttccaagctgctcaatcaaaagaaagtttcaattctgtgagatgatcgcacacatcacaaagaagtttctcagaattcttctgtctagtttttatgtgaagatatttcgtttttcaccatagggctcaaagtgctccaaatggccacttgcagattttacaaagagagagtttcaaaactcctcaatcaaaagaaaggtttaactctcttagatgaatgcacacatccaagcaagcttctcaggttgcttctgtctggattttatgtgaagatatttccttttctaccataggccccaaagcactccaaatgtccacttgtagatccacaaaaagagagtttccaaactcctcaatcaaaagaaaggtttaactctctgaggtgaatgcacaaatcacaaagaagtttctctgattgcttatgtctagattttatgtgaagatagtcctttttctaccgtaggtgacaaagcgctccaaatgtccacttgcagattctacaaaaagacagtttccaaacttctcaatctaaaaaatggttcagctctgtgggatgaacacacacatcgcatagaagttgctcagaatacttctttgcagttttgttgtgaagatatttcattttccacaataggcctcaaggcactccaaatgaccaattgcaagttctacaaaaagattattacaaaactggtccatcaatagaaaggttcaactctgggaaatgaatgcacacatcaccaagaggttgctcagaatgcttctatctagtttttatgtgaatatattttcctttgcagcatgggcctcgaggcgcttcaaatgtccacatgcagattttataaaaagagagttttaaaactgctcaatcaaaagaaatgtttaacactgtgagatgaatgcacacaataagaaaagcttcctcagattgcttctgtctagattttatgtgaagataattccttttctaccataggccgcaaagcgctccacatgttcacttgcagattctacaaaaagagtgtttcccatctgctcaatcaaaagaaaggttcaactctgtcagatgaacgctggcatcacaaagaattttctcagaattcttctgtctactttttatgtgaagatatttccttttcttccataggcctaaaagctctccaaatgtccacttgcagattctacaaaaagagacttccaaaactgctcaatcaaaaggaaggtttaactctgtgagatgaatgcacatatcacaaaaagtttctcagattgcttctgtctagattttatgtgaagttatttccttttctaccatagaacccaaagcacttataatgtccccttgcagattctacaaaaagaatgtttcaaaactgctcaatcaaaagaaaggttcaaatttgtgagatgaatgctcgcatcaccaagaagtttctcaaaatacttctgtctagtttttatgtgaagacatttctttttccgtgataggtctcaaaatgatcaaaatttccacttgcaaattctacaaaaagagagtttcaaagctgctcaatcaaaagaaaggtttatatctgtgagatgaacacacacttcacaaagcagtttctaagatttcttctgcctagattttatgtaatgatatttccttttctaccatactttgcaaactgctccaaatgtccacctgtagattctacaaaaacagtgtttccaaactgctcaatcaaaagaaaggttaactctgtgagatgaactcacacatcacaaagaagtttctcagaattcttctgtctagttctaatgtgaagatatttccttttggaccagaggccccaaggctatcgaaatgtccccttgtagattctacaaaaagagtatttcaaaactggtccatcaagagaaaggctcaactctgggaggtgaatgcacacatcacaaagaagtttctcagaatgcttctatctagtttttacatgaagctatttccttttccaccataagcctcaaagcgctccaaatgtccacttgcaggttctgcaaaaagagagtttccaaagttctcaatcaaaagaaacggttaactctgtgagataaatgcacacatcacaaagaagtttctcagaatttttctgtctagtttttgtgtgaagatatttcattttccaccataggcctcaaagcgctccaaatgtccacttgcagattctacaaaaagagagttttaaaactgctcaatcaaaagaaagcttttactctgtgagatgaatgcacccatcacaaagaattttctcagattgcttctgtctagattttatgtgaagatatttcctttcctaccgtaggatgcaaagcgctccaaatagccacacacagattctacaataagagtgtttcaaaactgctcaatcaaaagaaggtttaactctgtgaaatgaatgcacacatcacaaagaagtttctcagaattcttctgtctagtttttatgtgaagatatttccttttccacctaaggcctcacagcactcccaaagtcaaattgcagattcaactaaaagagagtttcttaactgctcaatcaaaagaaatgttcaactctgtgaggtgaaagcacacatcacaaagaagtttctcagaatacttctgtgtattttttatgtgaagatatttccttttccatcataggcctcaatgctctccaaaagtccacttgcagatcctacaaaaagagagttttaaagctgctcaatcaaaagaagggtttcactctgtgagatgaatgcacacatcacaaataattttctcagactgctctgtctagattttatgtgaagttatttccttctctatcataggccacaaagtttacaaatgtccacttgcagattctacaaaaagagtgcttccaaactgctcaatcaaaagaaaggttcaactgtgcgagatgaaatcacacaccacaaagaagtttctcagaattctcctgtctagtgtttatgtgaagatatttcattttccccaataggcctcaaggcactccaaatgtccacttgcagattctacaaagagagtatttcaaaaatggtccatcaaaagaaagtttcaactgtgggagacgaatttacacgtcacaatgtagtttctaagaatgcttctttctagtttttatgtgaatatattgccttttccaccatagtcctcaaagcgctccaaatgtccacttgtatattccacaaaaagagagtttcaaaagtgctcaatctaaagaaatggttaactttggagatgaatgcaaaaatcacaaagaagtttttcaggttgcttctgtctagattttatgtgaagatatttccatttctacctcaggccacaaagtgctccaaatgtacacttgcagatagtagaaaaagactatttccaaactgttcaatcaaaacaaagtttcaactctgggaaatgaatgcacacatcactaggaagtttctctgaattcttctgtctagtttttatgtgaagatatttccttttccaccttaggcctcaaggtactcgaaatgtccacttgcagattctacaaaaacagtattccaaaactggtccttcaaaagaaagtttcaactcttggagatgaatgtacacatcacaaagaagtatccctgaatgcttctatctagtttttatgtgaagatatttgcttttccaccataggcctgaaagcactacaaatatccacttgcagattttataaaaaaagtgtttcagaactgctcaatcgaatgaaaggattaactcggtgagatgaatgcacacatcacaaagaagtttctcagattgcttctgtctagatttcatgtgaagatatttccttttccaccatagacctcaaaatgctccaaatgtccactagcagaatctacaaaaagagagtttcaaaactactctatcaaaacaaaggtttaactctgtgacatgaatgtacacatcacaaagtagtttctcgtattgcttctgtctagattttatgtgaatacatttccttttctaccatagaccataaagcgctcctaatgtccacttgcagattctttaaaaagagtgtttccaaactgctcaatcaaaagaaagtttcaactgtatgaggtgaacacacacgtcacaaagaaatttctcagaattcttctatctagtttttatgtgaagatactaccttttccaccataggactcaaaacgctccaaatgtccacttgcagattctacaaaaagagagtttcaaaactgctcaatcaaaataatggttaattctgtaagatgaaggcacacatcacaaaggaatttctcatattgcttctgcatagattttatgtgaagttatttcctttgctgctatactctgcaaagagctccaaatgtccacttgcagattccacaaaaagagtgtttccaaactgctcaatcaaaagaaagtttcaaaactgtgagatgaacacacacatcacaaggtagtttcccagaatttttttgtctagtttttatgtgaagatacttccctttccaccataggcttcaaagcactccaaatgtctacttgcagattctacaaaaagagtatttcaaaacttttccatcaaaagaaaggttcaacactgggagatgaatgcacacatcacaaagaactttattggaatgcttcaatctagtttttatgttaatatatttccttttccaccataggcctcaaagcactcctaaggtccccttgcagattctacaaaaggagagtttcaaaactactcagtcaaaagatagggttaattctgtgaggtgaatgcacacatcacaaagtagtttctcagattgcttctgtcaagattgtatgtgaagatatttccttttccaccgtaggcctcaaagcgttccaaatgttcacttgaagattctacaaaaagagagtttcaaaactgctcaatcaaaagaaagttttaactctgtgagatgaattcccacatcacaaagaagtttctcaggttgcttctgtctagattttatgtgaagatatttccttttctaccataggccgcaaagcactcaaatgtcctcttgtagattctacaacaagagtgtttctaaacagctcaatcaacagaaaggtttaactctgtgagaggaacgcttatatcacaaagaagtttctcagaattcttctctctagtttttatgtaaagataattcatttttcaccaaaggcctccaggcactcgaattgtccatttgcagatcctataagaagagtatttcaaaactggtctatcaaaaaaaaaggtttaactctgagagatgaatgcaaacatcacaaagaagtttctcagattgcttcaggcttgattttatgtgaaaatatttccttttctaccataggccgcaaagagctccaaatgtccacgtgcagattctccaaaaagagtggttccaaactgctgaatcaaaagaaagtttcaactctgtgagatgaactcacacataacaaagaagtttctcagaattcttctgtctagtttttatgtgaagatatttcattttcctccttaagcctcaaggtgctccaaaagtccacttgccgattctacaaaaagagtatttcaaaactggtccatcaaaagaaatgttcaactctgggagatgaatagacacatcataaagtagtttctcagaatgcttctatctagtatttatgtgaagatatttccttttctgcaataggcctcaaagcgccccaaatatccacttgcagattctacaaaaagagagtttcaaaactgctcaatcaaaagaaagggttaactctgtgagatgaatgcacacatcagagagaagattttcagattgtttctgtctggattttatgtgaagatatttccttttctacctaaggctgcaaagagctccaaatgtccacttagagattctacaaaaagagggcttcaaaactgctcaaagaaggcttcaaatctgtgagatgaacacacaaatcaccaagaagtttgacagagtacttctgtctagtttttatctgaagatattacctattccaccataggcctcaaagcgctccaaatgttcacttgcagattctacaaaaagagagtttcaaaactgctctatcataagaaatgattaactctgtgagatgaatgcacgcatcacaaagaagtttctcagattgcttctgtctagattttatgtgatgacattttcttttctactataggctgcaaagcactcaaaatgtccatttgcggatactacaaaaagagtatttgcaaactgctcaatcaaaagaaagtttcaactctgtgagatgaacgcacacatcacaaagaagtgtctcagaattcttctgagtttttcatgtgacgatgtttttatgtgaagatattccattttccaccattgtcctcaaggcactcgaaatgtccagttgcagattctaccaaaagagtacttcaaaactgctccatcgaaagaaaggttcaatctgggagatgaacgcactcttcacaaagaagtttcttggaatgcttctacttagtttttatgtgaagatatttccttttccaccataggcctcaaagagctccaaatgccgacttgcagattctacaaaaagagattttcaaaactgctcaaccaaaagaaaggtttaacacagtgagatgaaagcacacatcacaaagaagtttctcagatggcttctgtcccgatgttatgtccagatatttccagttctaccacaggcttcaaatcactccaaggtccacttgcagattctacaaaaagagtgctttcaaactgcataatcaaaggaaagcttcagctctgtgagatgaatgcacacctcacaaagaaattttacaaaattcttctgtctagtttttatgtaaagatacttcctcctccgccatagaccccaagtgctccaaatgtccacttgcagattctacaaaaagagagtttcaaaactgctcaatcaaaagaaatgcttaactctgtgagatgaatgcacacgtcacaaagaagtttctcagatttcttctgtctagattttatgtgaagataattccttttccaccaaaggctgcaaagctctccaaatgtccactttcagattctgcaaaaagagtgtttccaaactgctcaatcaaaagaaaggttcaactctgtgagatgaatgcacacatcacaaagaagtttctcagaattcttctgtctagtttttatgtgaagatacttccttttctaccataggcctcaaaacactacaagtgtccacttgcagattctacaaaaagactgttccaaaactgctcaaactaaagaaaggtttaactctgtgagatgaatgcacacatcacaaagaagtttctcagattgcttcttgtagaatatatgaaaagttaattccttttcaccataggtcacaaagcactcaaaaagtccacttgtagataatacaagagagtttcaaaactgctcaatctaaagaaaggtttaactctgtgggatgaatgcacacatcacaaagaaatttccaagattgcttctgtctatattttatgtgaagatatttccttttctaccataggcctcaaagtgctccaaatgtccacttgcagattctagaaaaagagagtttccacactgctaaatcaaaagtaaggttccactctgtgagatgagtgcacacatcacaaagaagtttctcagaatgcttctttctctttattatacgaagatatttcgttatccaccataggcctcaaagagctccaaatgtccacttgcggattctacaaagagagtttttcaaaactgctcaatcaaaagtaacgttcaactctgtgaggtgaatgcacacatcacaaagatgtttgtcagaatgtgtctgtctagattttatgtgaagatatttccttttctaccataggcctcaaagcgctagaaatgtccacttgcagactccagtaaaagaggttttcaagctgctcaatcaaaataaatgttcaactctgtgagatgaatgcacacatcacaaagaagtttgtcagaatgcttctgtctagttcttatgtgacgatatttccttttccaccaaaggcttcaaagcacttcaaatgtccaatcacagattttaccaaaagggggcttcaaaacggctaaatcaaaagtaagtttcaactctgtgagatgaatgcacatatctcaaagaaggttgtcagaatccttctgtctagtttttatgtgaagatattttctttttaccataggcctaaaagtgcacaaaatgtccacttgcagattttacaaaaagagtgcttcgaaactgctaaatcaaaagaaagattcaactctgtgggatgaatgcacacataacaaagaagtgtcttagaatgcttctgtctagttattatgtgaagatattttgttatccaccatagtcctgaaagtgctccaaatgtccaattgcagattctacaaagagagtgttctgggaggggaaacaagatagccaaataggaacagctccggactacagcttcctgtgtgagtgacgcagaagatgggtgatttctgcatttccatctgaggtaccgggttcatctcaccagtgagtgccagacagtgggagcaggtcagtgtgtgcgtgcaccgtgcacgagccaaagcagggcgaggcattgcctcactcaggaaggactaggagtcagggagttccctttcctagtcaaagaaaggggtgacagacagcacctagaattcaggtcactcccacccgaatactgcgcttttcccacgggcttaaaaaacgccacacgaagagattatatcccgcacctggctcagagggtcctacgcccatggagtctcactgattgctagcacagctgtctgagatcaaactgcaaggaggcagcgaggctaggggaggggcgcctgccattgcccaggcttgcttaggtaaacaaagcagctgggaagctcgaactgggtggagcccaccacagctcaaggaggcctgcctgcctctgtaggctccacctctgggggcaggacacagataaacaaaaagacagcagtgacctctgcagacttaaatgtccctgtctgacagctttcaagagagcagtggttctcccagcacgcagctggagatctaagcatgggcagactgcctcctcaagtggggccctgacccctgacccctgagcagcctaactaggaggcacccaaccagcaggggcagactgacacttcacacggccaggtactcctacagacgtgcagctgagggtcctgtttgttagaaggaaaactaacaaacagaaaggacatccacagcaaaatcccatctgtacatcaccattatcaaagaccaaaagtagataaaaacccaaaggtggggaaaaaacaaaacagaaaaactggaaaatctaaaaagcagagcgcctctcctcctccaaaggaatgtagttcctcaccagcaacggaacaaagctggatggagaatgactttgactagctgagagaagaaggctccagacgatcaaattactccgagttacagaaggacattcaaaccaaaggcaaagaagttgaaaacattgaaaaaaatttagaaggatgtataactagaataatcaacacagagaagtgcttaaaggagctgatggagctgaaagccaaagttcaagaagtacgtgaagaatgcagaagcctcaggagctgatatgatcaactggaagaaacagtatcagcaatggaagatgaagtggatgaaatgaagcaagaaaggaaatttagagaaaaaagaataaaaagaaataagtaaagcctccaagaaatatgggactatgtgaaaacaccaaatctacgtctgattggtgtacctgaaagtgatggggagaatgaaaccaagttggaaaacactctgcacgatattatccaagagaacttccccaatctagcaaggcaggccaacattcagattcaggaaatatagagaacaccataaagatactcctcgagaacagcaactccaagacacataattgtcagattcaccaaagttgaaatgaaggaaaaaatgttaagggcagccaaagagaaaggttgggttaccctcaaagggaagcccatcagactaacaacagatctcttggcagaaactctacaagccagaagagagtggggggcaatattcaacattcttaaagaaaataattttcaacccagaatttcatatccagccaaactaagcttcataagtgaaggagaaataaaatactttacagacaagcaaatgttgagagattttgtcaccaccaggcctgcccaaaaggacctccttaaggaagcactaaatatggagaagaacaaccggtaccagccgtggcaaaatcatgccaaaatgtaaaggccatcatgactaggaagaacctgcatcaactaacgaacaaaataaccagctaacatcataaggacaggatcaaatttacacataacaatattaactttaaatgtaaatggactaaatactccaattaaaagacacagactggcaatctggataaagagtcaagactcatcagtatgctatattcaggaaacccatctcatgtgcagagacacacataggctcaaaataaaaggatgaaggaagatctaccatgcaaatggaaaacaaaaaaaggcagggattgcaatcctagtctcttataaacagattttaaaccaacaaagatcaaaagagacaaagaaggccattacttaatagtaaagggatcaattcaacaagaagagctaactatcctaaatatatatgcacccaatacaggggcacccagattcataaagcaagtcctgactgacctacaaaaagacttagactcccacacattaataatgggagactttaacactaaactgtcaacattagacagatcaacaagacagaaagtcaacaaggatacccaggaattgaactcagctctgcaccaagctgacctaatagacatctacagaactgtccaccccaaattgacagaatatacattttttcatcaccacaccacacctattccaaaattgaccacatacttggaagtaaagctctcctcagcaaatgtaaaagaacagaaattataaaaaactatctctcagaccacagggcaatcaaactagaactcaggattaagaatctcactcaaaaccgctcaactacatggaaactgtacaacttgctcctgaatgactactgggtacataacgaaatgaaggcataaataaagatgttctttgaaaccaatgagaacaaatacacaacataccagaatctctgggacgcattcaaagcagtgtgtagagggaaatttatagcactaaatacccacaagagaaagcaggaaagatccaacattgacaccctaacatcacaattaaaagaagcagaaaagcaagagcaaacacattcaaaagctagcagaaggcaagaaataactaaaatcatagcagaactgaaggaaatagagacacaaaaaacccttcaaaaaactaacgaatccaggaactggttttttgaaaagatcaataaaattgatagaccgctagcaagactaataaaggaaaaaagagagaataatcaaatagatgcaacaaaaaatgataaaggggatatcaccaccaatcccacagaaatacgaactaccatcagagaatactacatacacctctatgcaaataaactagaaaatctagaagaaatggataaattccttgacacatacactctcccaagactaaactaggaagaagttgaatctcttaatagaccaataacaggagctgaaattgtggcaataatcaatagattaccaatgaaaaagagtccaggaccagatggattcagagccgagttctaccagaggtacaaggaggaaatggtactgttccttctgaaaatattccaatgaatagaaaaagagggaatcctccttaactcattttatgaggccagcatcatcctgataccaaaatcgggcagaaacacaaccaaaaaagagaattttagaccaatatccttgatgaacattgatgtaaaaatcctcaataaaatactggcaaaccgaatctagcagcacatcaaaaagcttatccaccatgatcaagtgggcttcatccctgggatgcaaggctggttcaatttatgcaaatcaataaatgtaatccagcatataacagaaccaaagacaaaaaccacatgattatctcaatagatgcagaaaaagcctttgacaaacttcaacactgcttcatcctaaaaactctcaataaaataggtattgatgggacacatttcaaaataataagagctatctatgacaaacccacagccaatatcatactgaatgggcaaaaactggaagcattccctttgaaaactggcacaagacagggatgccctctctcaccactcctattcaacatagtgttggaagttctggccagggcaattaggcaggagaaggaaataaatggtattcaattaggaaaagaggaagtcaaattgtccctgtttgcagacgacatgattgtatatctagaaaaccccattgtctcaacccaaaatctccttaagctgataagcaacttcagcaaagtctcaggatacaaaatcaatgtacaaaaatcacaagcattcttatatacgaacaacagacaaacagagagccaaatcatgagtgaactcccattcacaattgcttcaaagagaaaaaaaaaaatacctaggaatccaacttacaagggatgtgtaggacctcttcaaggagaactacaaaccactgctcaagcaaataaaagaggacacaaacaaatggaagaacattccatgctcatggctaggaagaatcaatatcgtgaaaatggccatactgcccaaggtaatttacagattcaatgccatcttcatcaagctaccaatgactttcttcacagaattggaaaaaactactttaaagttcacatggaatcaaaaaagagcccgcatcaccaagtcaatcctgagacaaaagaacaaagctggaggcatcatgctacctgagttcagactgtactacaaggctacagtaaccaaaacagcatggtactggtaccaaaacagagatataggtcaatggaacagaacagagccctcagaaataatgccgcatacctacaactatctgatctttgacaaacctgagaaaaacaagcaatggggaaaggattccctatttaataaatggtgctgggaaaactggctagccatatgtagaaagctgaaactggatcccttccttacaccttatacaaaaattaattcaaaatggattaaagacttaaacgttagacctaaaaccataaaaaccctagaagaaaacctaggcattaacattcaggacataggcatgggcaagaacttcatgtctaaaacaccaaaagcaatgacaacaaaagccaaaattgacaaattggatctaattaaactaaagagcttctgcacagcaaaagaaactaccatcagagtgaacaggcaacctacaaaatgggagaaaattttcgcaacctactcatctgacaaagggctaatatccggaatctacaatgaactcaaacaaatttacaagaaaaaaacaaacaaccccatcaaaaagtggatgaatgacatgaacagacacttctcaaaagaagacatttatgcagccaaaaaacacatgaaaaaatgctcaccatcactggccatcagagaaatgcaaatcaaaaccacaatgagatgtcgtttcacaccagttagaatggcaatcatcaaaaagtcaggaaacaacaggtgctggagaggatgtggagaaacaggaacacttttacactgttggtgggactgtaaactagttcaacgattgtggaagtcagtgtggcgattcctcagggatctagaactagaaatagcatttgacccagccatcccattactgggtatatacccaaaggaatataaatcattctgctataaagacacatgcacacgtatgtttatggtggcattattcacaagagcaaagacttggaaccaatccaaatgtcccacaataatagattggattaagaaaatgtggcacatatacaccatggaatactatacagccataaaaaatgatgagttcatgtcctttgtagggacaaggatgaaattggaaatcatcattctcagtaaactatcacaagaacaagaaaacaaacaccgcatattctcactcataggtgggaattgaacaatgagaacacataaacacaggaagcagaacatcacactctggggactgttgtggggtggtgggatgggtgaaggataccactgggatatacacctaatgatagatgatgagttagtgggtgcagcgcaccagcatggcacatgtaaacatatgtagctaacctgcacattgtgcacatgtacccttaaacttaaagtataataataaagtaaataaataaaataaataaataaatctatgaacataaagaaaataaaacccaaactgctctttaaaaaaaaaaaacttgacagaaaaattctgagaaacttctttgtgatgtgtgcgttcacctcacagagttcaacctttcttttgattgagcagtttggaaatactctttttgtagaatctgcaggtgcacatttagagtgctttgcggcctatggtagaaaaggaaatatcttcacataaaatttagacagaagcaatctgagaaacttctttgtaatatgtgcattggtatcacagacttaaacctttcttttgatagagcaattttgaaactctctttttgtagaatctgcaagtgtacattggagcactttgaggcctatggtggaaaaggtaatatcttcaacataaaaactagaccgaagaatttcgataaacttctttgtgatgtgtgcgttcatttcacagagttgaacctctcttttgatggagcagtttggaaacactcttaatgtagaatcttcaagtgtacatttgcagcgctcagtgacctatggtacaaaaggaagttttttcttatgaaacctagacagaagcagtctcagaaacttctttgtgatgtgtgcattcaactcacacagctaaaacttccttttgattgagcagtttagaaactcccttttgtagaatctgcaagtgtacatttgaagcgctttgaggcctatggtggaaaaggtaatatcttcacataaaaaccagacagaagaattctgagaaacttctttgtgatatctgcgttcatctcacagatttgaacctttcttttgattgcgcagtttggaatcactctttttgtagaaactgcaagtggacatttggagcgctttgtggcctatggtagaaaacgtaatatcttcacataaattccagacagaagcaatctgagaaactactttgtgatgtgtgcattcatgtcacagagttaaacctttcttttgattgagcagtttagaaactctctttttctaaaatgagatgcatgcattcatctcacagagataaaacttgcagatagaatctgcaagtagacatttggagaactttgtggcctatggtagaaaaggaaatatctgcgcataaaaactagatagaagaattctgagaaacttctttgtgatgtgtgcgttcatctcatggagttgaatcttacttttgattgagcagttcagaaaccctctttttgtataatctgcaagtagatatatggagcgctatgtggcctatggttgaaaaggaaatatcttcacataaaatctagacagaagcaatctgagaaacttctttgtgatgggtgcattcatctcacagagataaaaatttcttttgattgagcagttttgaaaatctcttttatttgaatctgcaaatggacattaggagtgctttgtggccaatggtggaaaaggaaatatcttcacataaaaactagacagtagaattctgagaaacttctttgtgaagtgtgcgttcatttcacaatgttgaacctttctttagattgagcagtatggaaacactctttttgtagaatctgcaagtggacatttggagaactttgtgtcctatggcagaaaaggaaatatcttcaaataaaatctagacagaagcaatctgagaaacttctttgtgatgtgagcattcatctcaaagagttaaagctttcttttgattgaggagttttgaaactctctttttgtagaatctgcaagtggacatttggagcgctttgaagcctatcatggaaaaggaaatatcttcacataaaaaccaggcagaaaaattctgagaaatgtctttgcaatgtgagggttcatgtcacagagttgaacctttcttttgattgagcagtttggaaacactctttttgtagaatctgctagtggacatttggagcactttgtggcctatggtagaaaaggaaatatcttcacataaaatatagacagaagcaatctgagaaacttctttgtaatgtgtgtgttcatctcacagagttaaatcttacttttgattgagcagttttgaaactccctttttgtagaatctgcaactgtatatttggaatgctttggggcctatggtggaacaggaaatatcttcacataaaaactatacagaagaaatttcagaaactacttcataatgtgtgccttcatcttacagagttgaaactttctttgatagagcagtagggaaacactctttttgtagaatctgcaagtggacatttggagcgctttgcggcctattgtaaaaaaggaaatatcttcacataaaatctagacagaagaaatctgagaaacttccttgtgatgtgggcattcatctcacagagttaaacctttcttttgatagtgcagatttgaaactcactttttgtagaatgtgcaagtagacatttcgatttctttgtggcccatggtagaaaaggaaatatcacataaatactagacagaagcaacctgagaaacttctttgtgatgtgtgaattcatctcacagacttaaacctttcttttgatagagcagttttgaaactctccttttgtagaatctgcaagtggacatttggagtgctttttggcctatgtaagaaaaggaaatatcttcacataaaatctagacagaagcaacctgggaaacttctttgtgatgtgtgcgttcatctcacagagttgaaactttcttttgattgagcagtttggaaacacttcttgtagaatctgcaagtggacatttggagcgttttgcggcctatggtagaaaaggaaatatcttcacataaaaagtagacagaagaattctgagaaagttctctgtgatgtgtgcattcatctaacagagttgaaactttcatttgatgaagcagtttggaaatattctttttgtagaacctgcaattggacattgggagtgctttgtggcctatggtaggaaaggaaatatcttcacataacatctagacagaagcaatcagagaaacttctttgtgatgtgtgcattcatctcacagatttaaaacttggttttgattgagcagttttcaaactcctttttgtagaatctgcaagtgaacatttgtagtgctttgagagctaaggtggaaaaggaacataaaaactagacagggaattctgagaagcttctttgtgatgtgtgcattcatctcacagagttgaacttttcttttgatagagctgtttggaaacattctttttgtagaatctgcaagtggatatttggagcacattgagacctctggtaaaaaaggaaatatcttcacacaaaatctagacagaaggaatctgagaaacttctctgtgatgtatgcattcatctcacagtgttaaacctttcttttgatagagttgttttgaaactctctttttgtagaatctacaagtggagcgccttgagtcctatggtagaaaaggttaatatcttcacataaaaactggacagaaaaattcagaaaaacctctttgtgatgggtgcttacatctcacagagtaggaccttacttttgatggaccagttttgaaatattctttttgtagaatctgcaagtgggcatttcgagcgccttgaggcctatggtcgaaaatgaaatatattcacataaaaactatatggaataattctgagaaactgctttgtgatgcgtgcagtcatctcacagagttgaacctctattttgattgagcagtttggaaacactctttttgtacaatctgcaagtgggaatttggaccgctttgtggcctatggtagaaaaggaaatatcttcacataaaatctagacaaaagaaatctgaaaaaacttcgttgtgatgtatgcattcatctcacagagataaaactttcttttgatagagcagttttgaaactctcttcagtctcttcttgtagaatctggaagtggagcactttgaggcctatggtggaaaaggtaatatcttcaaatcaaaactagatagaagaattctgacaaacttctttgtgatgtgtgcatgcatctcacagagttgaaccttacttttcatggacaagttttgaaatattctttttgtagtatctgcaagtgggcatttcgagcgccttgaggccaatggtcgaaaatgaaatatcttcacataaaaactagacagaagaattctgagaaacttctttgtgatgtgtgatttaattccacagagttgaacctttcttttgattgagcagttgggaaacactcttttagtagaatctgcaagtggatatttggatcgctttgtggcccatgctagaaaagaaaacatcttcccatgaaatctagacagaaggaatctgagaaactacttactgatgtgtgcattcatctcacggagttgaaccattcttatgattgagaagttttgaaacgttctttttgtagaatctgcaagtggacatttgtagcgctttgaggcttatggtggaaaaggaagtatattcacataaaaaatgagacagaagatttctgagaaacttctttgtgatgtgttcattcatctcacagagttgaatcttacatttaattgagcagtttggaaacactctttttgtggaatctgcaagtggacacttgaattgtttggggcctattatagaaaagggaatatcttcacataaaatgtagacaaaagcagtctgataaacttatttgtgatatgtgcattcatctcacagttttaaaactttcttttgatggagcagtttggaaacactcattttgtagaatctgcaattgtacatttggagtgctatgaggcctatggtggaaaatgaaatatcttcacattaaaactggaaagaagaattctgagaaacttctttgtgatgcgtcaattcatctcacagagatgaactatttttgattgagcaggttggaaacactctttttgtagagtctgcaagttgacacttgtagcgctttgtgtcctatgttagaaaaggaaatatcttcacataaaatctagacagaagcaatctgagaaacttctttgtgatctgttcattcatttcacagagtcgaaactttcttttgattgagcagttttgaaactgtctttttgtagaatctgcaagtggatatttggagctctttgaggcctacagtggaaaaggaaatatcttcacataaaaactagacagaagaattctgagaaacatctttatgatgtgttcattcatctcacagagttgaacttttcttttgattgagcagtttggaaatactctttgcgcagaatctgcaagtggacatttggtgtgctttgcggcctattataaaaaaggaaatatcttccaataaaatctaggcagaagtaatctgtgaaatttctttgtgatgtgtgcattcatgtcactgagttaaacctttcttttgatagagcagttttgaaactctctttttttgtagaatctgcaagtggacatttggagtgctttgaggcccatggtggaaaaggcaatatcttcacataaaaactagacagaagaattctgacaaacatttttgtgatgtgtgtgttcatctcacagagtagaacaattcttttaattcagcagtttggaaagactgtttttgtagaatctggaagtggacatttggaatgctttgcggcctatggaagaaaaggaaatatcttcatataaaatctagacagaagcaatctgagcaactttttatgatgtgtgcattcatctcacagagttaaacctttcttttgattaggcagttttgaaattctctttttgtagaatctgcaagtggttatttggaacactttgaggcctatgttggaaaaggaaatattttcacataaaatctagacagaagaattctgagaaacttcttcatgatgtgtgtcttcatctcacagagttgaaccgttcttttgattgagcagtttggaaacactccttttgtagaatctggaagtggacatttggagagctttgaggcctatggtggaaaaggaaatatcttcacaaaaactagacagaagaattctgaaaaacttctttgtgatgtgttcgtttatctcacagagtttaacctttcttttcattgagcagtttggaaacaatctttttgtagaatctgcatgtggatgtttggagcacattgtggcttattttagaaaaggaaatatcttcacataaaatcaaagcagaagcaatctgaaaaacttccttctgatgtgtgcattcatctcacagagttattcctttcttttgatagagcagttttgaaactctctttttgtggaatctgaaagtggtcatttggaaggctttgaagcctatggtggaaaaggaaatatcttcacataaaaactagacaaaagcattctgggaaacttctttgtgatttgtgccttcatcgagttgaagctttcctttcattgagcagcttggaaacacactttttgtagaatctgcaagcggacatttggagcacttgcggcctatggtagaaaaggaaataacttcacataaaatctagacagaatcaatctgagaaacttctttgtgatgtgtgcattcatctcagagagttaaacctttcttttgattgagcagtatgtaaactctctttttgtaggatctgcaagtggacatttggagcgctttgaggcctatggtggaaaagtaaatatcttcacataaaaacaagacagaagaattctgagaaacttctttgtgatgtgtgcgttcatctcacagagttgaacatttcttttgattgagcagtttggaaacactttttgtagaatctgcaagtggacattttgagcggtttgtggcctattttagaaaaggaaatatcttcacataaaatctagacataagcaatctgagaaacttctttgtgatctgtgcattcatctcacagagttaaacctttcttttgattgagcagtattgaaactctctttttgtaggatctgcaagtggacatttggagcgctttgaggcctatggtggaaaagtaaatatcttcacataaaaactagacagaagaattctgagaaacgtcttcgtgatatgtgtgttcatctcacacagttgagcctttttttttgattaaatagtttggtaatactctttttgtagaaattgcaagtggacatttggagcgctttgtggcctctggtagaaaaggaaataccttcacataaaaaatagacagaagaattctgagaaacttctttgtgatgtgtcaattcatctcacagagttgaacattccttttgattgagctgtttggaaacactccttttgcagaatctggaagtggacttttggagcactttgaggcctatggtggaaaaggaaatatcttcatgtgaaatctagacagaagcaatctgagaaacttctttgtgatgtgtgcattcacctcacagagttaaaactttgttttgattgaggagttttgaaactctctttttatagaatctgcaagtggacatttgaagcgctttgaggcttatggtggaaaaaaaatatcatcacataaaaaccagacggaaaaattctgacaaatggctttttgatgtgtgcattcatcccactgagttgaaacttactttgctttgagcagttttggaacactgtttttgtggaatgtgcaagtttacctttgaagcgctttgaggcctttggtggataacgaactatcttcatataataactagacagaagcattctgagaaacttctttgtgatgtgtgcattcatctgacagaattgaaactttcttttgattgggcagttttgaaacactccttttgtagaatctgcaagtggacatttggagctctttgggacctattgtggaaaaggaaatatcttcacataaaaactacatagaagcattctgagagccttctttgtgatgagtgccttcatctgacagggtttatcctttgttttgattgagtactcttgaaacactgtttttgaggtgtctgcaagtgggatactgggagcactttcaggcctactgtggaaaagcaaatatcttcacataaaaactacacagaagcattctgagaaacttcttggtgatgtgtgcattcatctcacagagttgaacctttcttttgattgagagtttttgaaacatgctttttgtagtatctgcaagtggatatttggagcgatttgaggcctattgtggaaaaccaaatatcttcctataaaaactacacagaaacattctgagaaacttctttgtgatgtgtgcattcacctcacagagtggaacctatcttttgattaagcagttttgaatctctctgtttgaagaatctgaaagtggatatttggagaccttggaggccgatgttggaaaaggaaatatcttcaaataaaaattacacagaagcattctgagaaacatttgtgatgtgtgcattcatctcacagtgttgaaactatgttatgattgagcggttttgaaacactcttattgtagaatctgaaggtggatacttgggccactttgaggcctatggtagaaaaggaaatatcttcacacaaaaactacacagaagcattctgagaaacttctttgttatgtatgcattcatctcactttgttgatcttttcttttgattgagcagttttgatacacgttttttcagctaatgcaagtggatatttggagcgccttgaggcctaatgtggaaaaccgaatatcttcacataaaaactacatagaagcattctgagaaacttctttgtgatgtgtgcatacatcttccagagttgaaactttcttttgattgtgtagttttgaaacactctttttttagaatctgcaagtgggtatttggagggatttgaagcctattgttgaaaaggtaatatcttcgcataaaaactatgcagaatcattcggagaaacttctttgtgatgtgtgctttcaactcacagagttgaacctatcttttgattgagcagttttgaaacactcttttcgtagaatctgcaagtggatacttggagtggtttggggtctactgtgatgaaggaaatatcttcacataaaaactacacagaagtattctgagaaacttctttgtgatgtgtgcattcaactcatggagttaatcctgtattttgattgagcagttttgaatctctcttttagcagaatctgcaagtggatatttggagagctttgagtcctaatgtgaaaaggaaatatcatcaaattaaaactatacagaagcattctgagaaacatatttgtgatgtgtgcattcaactcacagagttgaacctatcttttgattgagcagttttgaatctctgttttggtagaatctgcaagtcgatatttggagccctttgatgtctatggtggaaaaggaaataccttcaaataaaaactacacaaaagcattctgagaagcttatttgcgatgtgtgcattcatctcacttggttgaaccaatcttatgattgaacagttttaaaacactctttttgtagaatttctaagtggttatttggagcgttttgaggcctatagtggaaaaggaaatatcttcacataaaaactacagagaagcattctgagaaacttctttgtgatctgtgcactcatctcacagagttgatcctttcttttgattgagcagttttgaaaatctctttttgcagaatctgcaagtggacatttggagcactttgaggcctatggtctgaaaagaaatacctttacatgaaaacaagatagaagaattctgagaaacttctttgtgatgtgtgccttcaactcacagagttgaacttatctttggattgagcagttttgaatctttcctttgtagaatctgcaagtggatatttggagcccgttttgccttgtggtgtaaaaggaaatatcttcacataaaaactacacagaagcattctgaaaaaacttctttgtgacgtgtgcattcatctcacagtgttgaccccgtcttttgattgagcagttttgaagcactattttcatagaatctgcaagtggatatttggagccctttgcagcctacggtggaaaaggaaacatcttcacacaaaaactatacagaagcattctgagaaacttctttgtgatgtgtgcattcatctaacagagttgaacctttgctttgatagagcatttttgaaaaactctttttgtagaatctgcaagtggatatttggagtgctttgaggcctattgtggcaaaggaaataccttcacatagaaactacacagtagaattctgtcaaacttctttgtgatgtgtgccttcaagtcacacagttgaaactttgttttgattaaccagtttggaaacattctctttctagaaactgcaagtggatatgtggagccttttgcggcctaaggtggaaaaggaaatatcttcacataaaaactacacagaagcattcaaagaaacttctttttgatgtgtgcattcagctcacagagttgaacttatctttttattgaggagctttgaaaatctctttttgtagaatctgcaagtggatatttagagccccttgctgcctgtggtggaaaaagaaatatcttctcataaaaactatacagaatcattctgaaaaaacttattggtgatgcgtgcattaatctcacagtgttgaacctttcttttgattgacctgtttagaaacactatttttgtagaacctgcaagtggatatttggagccttttgagtcctttgttggaaaaggaaatatcttcacataaaacctacacggaagcattctgagaaactcctttgtgatgtgtgccttcatctcacagagttgaagctttcttttgattgagcagtgttgaaagagtctttttgtagattctgcaagtggatatttcgagggctttgagtcctattttggaaaaggaaatatcttcacaaaaaaactacacagaagccttctgagaaacttctttgcaatgtgtgcattcatctcacagagttgaacatttctttttattgagcacttttgaagcactctttttgtagaatcagcaagtgtatatttggagccctttgcagcctgtggtggagaaaggaaatatcttcacataaaatctacagagaagcgttctgtgaaactggtttgtgatgtgtgcattcatctcacagatttgaacctttctgttgattcagcagttttgaaacactctttctgtagaatctgcagttggatatttggagcactttgaggcctattgtggcaaaggaaatatcttcacataaaaactacacagaagcattctgagaaactatattgtgatgtgtgcattcatctcacagagttgaacctttcttttgtttgagcagttttgaaacactctattttgtaggatctgcaagtggatatttggagtgctttgaagcctatcatggaaaaggaaatatattcacatgaaaacaacacagaatcattctgacaaacttctttgcaatgtgtgcgttcatctcacagagttgaacttttctttttattgagcagttttcaaaaactgtttttgtagtatctctaactggacatttggagcgcattgaggcctatggtggaaaaggctatatcttcacacaaaatctacacagaagcattctgagaaacttctttctgatgtgtgcattcaaatcacagatttgaatctgtcttttgattgcacagtttccaaactctctttttgtagaatctgcaagtggatatttggagcccttggtgtcctctggtggaaaagaaaatatcttcacataaaaactacacagaagcattctgagaaacttcattttcatgtatgcattcatctgagagagttgaacttttcttttcaccaagcatttttgaaacagtctttttgtagaatctgcaagtggatatttggagcccctcgaggcctactgtggaaaagaaaatatcttcacataaaaacaacacagatgcattctgagaaacttctttgcaatgtgtgcctgcatctcacagagatcaactttcttttgattgaggaattttgaaacacactttttgtagaatctgcaagtagatatttggagtacgttgaggcctatggtgaaaaaggaaatatcttcacataaagctacacagaagcattttgagaaacttctttcgacatgttcgttcaacacactgtggtgaacatttcttttgattgagaagttttgaaacccactatttgtagaatctgcaagtggatatttttagtgcttaggacctattgtggaaaaggaaatgtcttcacttaaaaactacacagaagcattctgagaaacatctgtgtgatttgttcattcacctcacagatttgtaactttcttttgattgagcagtttggaaacactcttttagtaaaatctacaagcggatacttggagcgctttgaggcctattgtagaaatggaaatatcttcacataaaaactaaacagaagcattctgagaaacttctttgagatgtgtgtattgaactcagagttgtacctatcttttgatagacgagttttgaaactctctttatgtagaatctgcaagtgaatatttggagccctttgtggtcaatggtgtaaaaggaaataccttcacataaaaactacacagaagctttctgagaaacttctttgtgatttgtgcattcatctcaaggagatgaacctttaatttgattgagcagttttgaaacactctttttgtagaatctgcaagtggatatttggaacgctttggagagaatggtggaaatggaaatatcttcacataaaaactacggaggagcattctgagaaacgtctttgtgatgtgtgcattcaactcacagagttcaacctttcttttgattgagcagttttgaatccctctttttgtagaatctgctagtgtatatttggagcactttggggcctatggtgaaaaggaaatttcttcacataaaaactataaaaaagcactctgaaaaacttctatgtgatgtgtgcatacaattcacagagttgaacatttcttttgattgtgcagttttgaaacactctttttgtagaaactgcaagtagatactcggagggcttcgcagactatagtggcaaaggaaataactttgcataaagctaaacagaagcattctgagaaacttctttgtgatgtgtgcattcaactcacagagttgaacctttcttttgattgagcagttttgaaactctatttttgtaaaatctgcaagtgtatatttggtgcgatttgcgtccaatggtggaaaattaaataccttcacataaaaagtagacagaagcattctgagaatcttctttgtgatgtgtgcattcacctcacagagttgtaactttttttattgaggacgtttgaaacactctttttgtagaatcttcaagtgggtgtttggagcactttgtggcctatagtggaaaacgatgtatattcacataaaaactagacagaagcattctgaaaaacttctttgtgatgtgtgccttcatttgaaagagttcaacctttcttttgattgagcacttttgaaatactctttttggagtatctgtaagtggatatttggagagctttgagtcctatggtggtaaggggaaacatcttcacataaaaacgacacagaagcattctgaaatacctctttgtgatgtatgcattcatctcacatagttgaaccattcttttgaatgagcagttttgaaacactctctttgtagaatgtgcaagtggatatttggaccgctttgatgagtatggtggaaaatgaaaaatcttcacataaaaactagacagaattactctgagaaacttctttgtgatgtgcgcattcatctcacaaatttgaaaatttcttttgattgagcagttttgaaacgctctttttctagaatctgccagtggatatttggagtgcattgagtcctatggtggagaaggaaatatcctcacataaaaactagagagaagcattctgagaaacttctttgttatgtgtgcatacatctcatggagttgaaactttctattgattcagcattttttaaacactttttgtagtatctgcagttgatatttggagcccattggggccaatggtggaaaaggattatcttctcataaaaactagattgaagcattttgagcaaattctttgtgatgtgttcgttcatctcacagatttgaaccattcttttgattcagcagttttgaagcactcttcgtagaatctgcaagtgcatatttagatcgctttgagacgtgtggtggaaaaggaaatatcttcacataaacactagacagaagcattctgagaaatgtctttgtgatgtgtccattcacttcacagagttgaaactttcttttcattgagcagttttgaaacactctttttatagaatatgcaagtggatatttggagcgttttggagagaatggtggaaatggaaatatcttcatataaaaactacggagaagcattctgagaaacggctttgttttgtgtgccttcagctcacagagttgaacctttcttttgattgagcagttttgaatccctctttttgtataatctgaaagtggatatttggagagctttagggcctatggtggaaaaggaaatatcttcacataaaaactacataaaagcattctgagaaacttctttctgatgtgcgcatacaactcccagagttgaacctttcttttgattgtgcaattttgaaacacttcttttgtagaatctgcaagtggatattcggagggctttgccgagtatagtggaaaaggaaataactttggataaaaggtagacagaagcattctgagaaacttctttgtgatgtgtgcattcaacgtacagagttgaacctttctttagattgggcagttttgaaacactatttttgtaaaatctgcaagtggatatttggtgacgattgcggcctatgatggaaaagcaaatatcttcacataaaaactagacagaagcattctgagaatcttctttgtgatgtgtgcattcatctcacacagttcaacttttcttttgattcagcagtttggaaacagtatttttctacaatctgcaaagggatacttcttagccgatttaggcctatggtgaattaggaaatatcttcacataaaaaataaacagaagctttctgagaaacttctttgggatgtgtgttttcatctcacagagatgaaactaccttttgattgagcaatttagaaactctcttttagtaggatctgcaaatggatatttggagcgctttgaggcctgtggtgaaaaaggaaatatcttcacataacaaccagacagaagcattctggaaacatctttgtgatgtgtgcattcatctcacagagttgaacctttcttttgattgagcagtttggaaacagtcttttatagtatctgcagagagatatttgtgagcattttgaggactttggtgagaaaggaaatatcttcatataaaacctagtcagaagattctgagaaactgctttgtgatgtgtgcattcaactgacagagttgaaactttgttttgattcagcagtttggaaacagtccttttgtaggatctgcaaagggatatttctgagcccattgagacctatggtgaaagaagaaatatcttcacttaaaaactagacagaagcattctgagaaacttcttagtgatgtgtgctttcatctcacatgtttgaacctttcttttgattgagcagtttggaaacagtgtttttgtagaatctgcaaaggatatgtcaagcgctttgatgcctatggtgaaaaaggacatatcttcacatggaatctaaacagaagctttctgagaaacttcttttttatgagttcatacatctcacagaggtgaaactttcttttcattgagcagtttggaaacagtctttttgtacagtctgcaaaggaaatttctgcgaagttggaggcctatggtgaaaaagaaatatcttcagataaaatgtagacagaagtattctgagaaaattttttgtgatgtatctattcatctcacagatttgaacttttcttttgatggagcagtctggaaacaatctttttgtagtatctgaagagggatatgtgagagcagtttaaggcctgtggtgaaaaaggaaatatcttcacataaaaactaggtagaagcattctaagaaacttctttgtattgtgtgcattcatctcaaagagttgaagctgtctttggattgagcagtttggaaactgtcgttttgtagaatctgtgaaggtatatttctgagcccattgaggcctatggatgaaataggaaatatcttcacataaaaactagacagaggatttctgagaaacttctttgtgatatgtggtttcatctcacagagttgaaccattcctttgattgagcagtttggaaacagtctttttgtaggatctgcaaagggatatttctgttcccattgatgcctatggtgaaaaaggacatatcttcacataaaaactagacagaagctttctgataaacttcttagtgatgtgtgctttcatgtcacagatttgaaactttcttttgattgatcagtttggaaacagtctttttgtagaatctgcaaatggatatttggagtgctttgaggcttatggtgaaaaaggaaataccttcacatgaaatataaacagaagctttctgagaaacttctttttgatgcatgcatacatctcacagagttgaacgtttcttttcattgagcagtttggaaacaatctttttgtacaatctggaatgggatatttctgagaagttggaggcctatatcaaaaaagaaatatcttcacataaaaactagacaaaagtattctgagaaacttctttgagaggtatcctttcatctcagagaggtgaactttacttttgatggagcagtttggagacagtctttttgtagtatctgcagagggatatctgagagcagtttaaggcctatggtgaaaaaggaaatatcttcacataaaaactaggcagaagcattctgagaaacttctttgtgatgtatgcattcaactcaaagaggtgaaactttctttggattgagcagtttggaaatagtccttttgcagtatctgtaaagggatatttctcagcccattgaggcctatggtgaaataggaaataacttctcataaaaaccagacagaacgtttctgagaaacttctttgagatatgtgctttcatctcacagagttgaacctttattttggttcagaagtttggaaacagtctttgtgtagaatctgcaaagggctatttttgagcaccttctggactatggtgaaacataaaatatcttcacataaaaactagacaggagctttctgagaaacttctttatgatgtgttctttcatctcacagagttgtaaatttcctttgattgagcagtttggaaacactctttatggggaatctgcaagtggatatttggagtgctttgtggcctatagtggaaaatgaaatatcttcacataaaaactagatagaatcattctgagaaacttctttgtgatgtgcacattcatcacaaagagttgaacatttctttcgattcagcagtttggaaacagtccttatgtagaatctgtgaagggatatttctcagaccattgatgcctatggatgaaataggaaatattctcacaaaaaaactagacagaaaatttctgagaaacttctttatgatatgtggtttcatctcacagagttgaaccgttcttttggttgagcagtttggaaacacattttttgtagaatctgcaagtggatatttggagcacatcgaggcctatggtggaaaatggaatattttcacataaaatttaaacagaatcattctgagaaacttctttgtgatgtgtgcattcaacccacagagttcaacctttcttttgattcaacagttttgaaacactctttttgtaaaatctgccagtggatttttggaacgctttgaggcctacagtggaaaaggaaatatcttcacataaatagtacacagaagcattctgagaaacttctttgtgatgtgtgcatttaactcaaagagtgcaatccttcttttgattgagcagttttgaaagactccttttgtagaatctgtaagtggatatttggagcgctatgtggccttaagtggaaaaggcaatatcttcacataaaaactagtcaacagcattctgagaaacttctttgtcatgtgtgcattcatctcacagagttgaagctttcttttgattgagcagttttgaagcactctttttgtagaatctccaattggatacttggagcgttttgaggcctattgtagaaaagtaaatatcttcacgtgaaaactacacagaagcattctgagaaattggtttgtgatgtgtgcattcaacacacagagttgaacctttcttttgattgagcagttttgaaacacactttttttaggatctgcaagtggatatttggagtgctttgtggcctactgcggaaaaggatatatcttcacataaaaactacggagaagcattctgagaaacttctttgtgatgtgtgcattcatctcgcagagttcaacctttcttttgattgagcagttttgaaccactctttttgtagagtgtgcaagtggatatttggagcactttgaggcttatggtaggaaaggaaatatcttcacataaaaactacagagaagcattctgacaaagttctttgtgttgtgtgtgttcaactcacagatttgagtctttcttttgattgagcagttttgaatcactctttttttagaatctgcaagtggatatttcgagtgttttgcagcctctgttggaaaaggaaatatcttcacataaaatctagacagaagcattctgagaaatttcttcatgatgtgtgcattcatctcacagagttgaacctttcttttgattgagcagttttgaaacactctttttgtagagtctccaagtggatatgtggagcactttgaagccatgatagaaaaggaaatatcttcacataagaactagacagaatcattctaagatacttctttgtgatgtgtacattcaactcacagagttgaacatttcttttgattgagcagttttgaagcactcttttcgtagaatcagcagttggatatttagagcgctttgaggcctatggtggaaaaggaaatatcttcacataaaaactagacagaagcattctgagaaacttttctgtgatgtgtgcattcaactcaccgagttgaacatgtcttttattgagcagtttggatacattcttttcgtaccatcttcaaatttgtatttggacagctttgaggcctatagtggaaaaggaaatatctgcacataaaaactagacagaagcattcagagaaacttctttgtgatgtgtgcattcatctcacagagttgaaccattcttttcattgagcagttttgagacactctttttgtagaatctgcaagtggatatttggatctctttgagacatacagtgcaaaagaatatatcttcccttaaaaactagccagaagcattctgagaaagtactttgtgatgtgtgtattctactcacagagttcaaactttattctgattgggcagttttgaaacacactttttgtagaatctgcaattggatatttggatcgctttgcggcctcttgtggaaaaggaaatatcttcacatgaaaactacagggaatcattttgagaaacttctttgtgatgtgtgctttcagctctcagagttgaaactttcttttgattgagcagttttgaaacactctttttgtagaatctgcaagtggatatttagagtgctttgatgcctatggtggaaaaggaaatatctgcaatgaaaactagacagaagcattctgagaaacttctttgtgttgtgtgtattcatctcagagagatgaacttactttttgttgagcagtttggaaacactctttttgtagagtctgccattggatatttggagcgcggtgaatcctatggtggaaaaggacatatcttcacataagaactataaagcaggttttctaaaaacaaccttgtgatgtgtgcattcatctcacagaggtaagtgtttcttttctcctatcagtctggaaactgtgttcttgtacaatctcaaagggggtatttttgagcactttgaggcctattgtgacaaaggaaatatcttcacattcaaagtatgcagaaagtttccaagatacttttttgtgatatgtgcattcatctcacagatttgaatgtctcttttaatttagccctttggaaacagtctttttgaagaatctgcaaacggatatttgtgagcactttgaggcctatgcaggaaaagaagtatcttcacagaaaactataaagaaggtttctgagaaactgttttttgatgtctgcattcatctcacagaggtaaacaattattttctttgatcagttgggaaactctgttcttgtaggatctgctaagggacatttttgagtgcctagagccctattgtgaaaaagatattgtcttcacatgaaaactagacagaagcctagtgagaaacttcttggtgatatgtgcattcatctcacagaaatgaaactttcttttgattaagcagtttagaaacgtctttttgtagaatctgtaaagggatatttctcatcactttgaggcctatggtgaaagagaaattatcttcacaaaaaaactagactaaagatttctgagaaactgctttgtgatgtatgcattcatctcacagagttcaacaattcttttgatggagcagttgggaaaccacgtttttatagaatctgcaaagggatatttgtgagcactttgagttctatggttaaaaggaaatatcttcacataaaaactataaagaaggtttgtgagaaacttctttatgatgtgtgcattcatctcacagagttgaaccattcctttgactcagcggtttggaaacagtctttttttaggatctgcaaagggatatttttgagcactttgaggcccatggtgaaaaaggaaacactttcacataaaaacaagatagatgctttctgagaatcatctttttgatgtttgcatttatcccacagaggtgaacctttcttttgatgagcattttggaagcagtatttggtagaatttccaaagggttattagttagtgttttgtgtcctatgttggaaaaggaattatttttaaataaaaactagacagaatatttctgagaaactgccttgtgatgtttgctttcatctcacagaagtaaccatttcttttcaatgaacagattggaaattctgttcttgtaaaatctgcaaagggatatttgtcagcactttgaggcctatggtgaaaaaggaattatcttcacataaaaactagacggaagctttctgtgaaacatcttggagatgcgagaattcatctcacagagttgaaacattcttttgattgggcagtttgtaaacagtattttggtagaatctgcaaatggatatttgtgatgctttgaagcctatggtgaaaacgaaatattttcacatgaaaactagagagaagctttctgagaaacctccttgtgatgtgtgcattcgtctcacagatttgaaactttctttggattgagcaatttggaaacagtatttttgtagaatctgtaaaggcatatttttgagtggtatgaggcctatgatgaaataggaaatatcttcacataaaaactagacagaaactttctgagaaacttctttgtgatgtgtgcattcatctcgtagagttcaaccattcttttgatggaacagtttggaaacactctttttgtagaatctgcaaagggatatttatgagtgctttgaggcctatggttaaaaaggaaatgtattcacataaaaagtataaacaaggtttctcagaaacagctttatgatttatgcattcatctcacagaagtaaacgtttcttttctctgatctgtctggaaactgttcttgtagattctgcaaagggataattgtgagtgctttgaggcctatggtgaaaaaggaaatatcttcacataaaaattagagagaggctttctgagaaacctctttgtgatgtgggcattcatctcacaaagttgaaacttacttttgattgagcagtatggaaaccgtctgtttgtggaatctgcaaagggatatttatgagagctttgaggccaatggtgaaaaaggaaatatattcatataaaaggtataaagaaggtttcttagaaacagctttgtggtgtgtgcattgatctcagagaggtaaacgtttattttctgtgatcagtcaggaaactgttcttgtagaatctgcaaagggatatttgtgagtgctttgaggcctatggtgaaaaaggaaatatcttcacataaaaactagacagaagctttcttagtggcttctttgtgatgtgtgcaatcatctcacagagttgaaccattcttttgattgagcagtctggaaacagtgtttttatagaatctgcaagggatacttgtcacgacttgtagtgctatggtgaaaaaggaaatatcttcacataaaaaatggacagaagatttctgagaaacctctttgagatgtgtgcatccatctcacaaagttcaaccatttatttgattgagcagttgcgaagcagtctttttgcagaatctacaaagggatattcctgagcactttgaagcctgtggtggaaaaggaaatatcttcacgtaaaaactaaaaagaagtttctgagaaacttctctgtgatgtacacattcatctcacagagttgaactattcttttgattaagcactttggaaacaatctttttgtagaatctgcaaagggatatttttgagcactttgagtcctagggagaaaaaagaattatcatcacataaaaagtataaagaaggtttctgagaaacagttttgtgatgtgtgcattcaccacacagagaaaaacgtttgttttgtttgatcagtctggaaattctgttcttgtagaatctgctaagggataattgtgagcagatggaggcctatggtgaaaaaggaaatgtcttcatataaaaattagacagaagcttcctgcaaaacttcttagtgatttgtggattcatctcagagttgaaactttctattcattgagccgtttggaaacagtctttttgtagactctgcaaatggatatttggagcactttgaggcctatggtgaaaaatgaaatacattcacataaaaatcagactgaaagtttgtgagaaacttctttgagatgtgtgcattcatctcacaaagttcaataattctttttattgagcgatttggaacaatctttttgtagaatctgcaaagagatatttgtgagggctttgaggcctatggtgaaaaaggaaatatcttcacagaaaaactataaagaaggtttctgagaaacttctttgtgatgtgtgcagtcatctcacacagttcaacttttcttttgattgagcagtttggaaacagtctttttaaatattcttcaagtggatacttctgagcaccttgaggctcatggggaaaaaggaaacattcacataaaaaattaatagaagatttctgagaaaccactttttgacatgtgcattcatctcacagagttgaacctttcttttgatgagcagtgtggaaacaatctttttgtagaatctgcaaagggacaattttgagtgctttacatcctgtggtggaaaaggagataccttcacataaaaactagacagaatgtttctcagaaactgctttgtgatatgtacattcatctcccagatgtgtctgtttcttttcattgagaagattggaaactcttttcttgtaagatctgcaaagggatatttgtgagccctttgaggtgtatggtgaaaaaggaaatatcttcacataaaaactacacagaagctttctgagaaacatcctcgtgatgtgagcattcacctcacagagttgaaacattcttttgattgagccatgtgtaaagagtctttttgtagaatctgcaaagggatatttgtgaatgctttgaggcctatggtgaaaaaggaaatatcttcacataaaaactagagagaagctttctgagaaacctctttgtggtgtgcatacatctcacagagttgaacctttcttttgattgagcaatttggaagaagtatttttgtagaatctgtaaagagatatttgtgagcactttgagacctacggtgaaaaactggacagaagcattatgagaaactacttcgtgatgtgtgcattcatcacacagagttgaacctttgttttgattgagccgtttggaaacagtctttttgtagactctgcaaacggatatttggagcactttgaggcctatcgtgaaaaaggaaatatattcacataaaaactagactgaaggattctgagaaacttctttgagctgtgtgcattcatctgacagtgttcaataattctttttattgagcagcttggaaacagtctttttgtagaatctgcaaagggatatttgtgatgtctttgaggtctatgttgaaaaaggaaatatcttcagggaaaaaccataaagaaagtttctgagaaacttctttggatgtgtgcattcatcacacagaggtgaaatattctttggattgagcagtttgcaaacagtctttttgtagaatctgcagagggatatttgtagagctttgaggcttatgatgaataaggaaatatattcacataaaaactagacaaaagttttctgagaaactttttgtgatgtgtgcatttatctcatagagtttaacatttttttttttgatagagcagtatggaaacagtctttttgtagaatctgcaaagggatatttaggagcaagttgaggcctatggtggaaaaggaaatatcttcacataaaagctagaaagaagcattctgagaagctgctttaagatatgtgtactcatctcacagatgtaaacatttcttttcattgagcagtttgtaaactctgttattctagagtctgcaaagggatatttttgagtgctttgagacccatgttgaaaaaggaagtatcttcatataaaaactagtgagaagcttactgagaaactactttctgatgagtgcattcatctaacagagttgaaactttcttttgattgagcagtttggaaacagtctttttgtagactctgcaaaggtatatttgggagtgcattgaggcctatgttcaaaaaggaaatatcttcaaataaaactgagaaggaagttttctgagaaacttctttgtgatgtacacattcgtctcacagggttgaatcattctgtttattgagcagtttggaaacaatctttttgtagaatctgcaaagggatatctgtgagtgcattgaggcatatggtgaaaaaggaaatatcttcatattaaaagtagaaagaagttttctgagtaactcatttgtgacatgtgcatttatcacacagaagtaaaaatttcttcccattaagcagttagtttttatgtgaagatatttccgttttcaccatagacctcaaactgtctacatatatccctttgcaaattctacaaaaagactgttacaaaactgctcaatcaaagaaagcttccactctgtgagatgaatgcacacatcacagagaagtttctcagaaagtttctgtctactttttatttgttgatactccctttttcaccatagacctcaaaccactcataaataacccttttcagattctacaaaaagactgtttccaaactactcaatcaaaagaaagcttcaattctgtgaggtgaatgcacacatcacaaagaagtttctcagaatgcttctgtctagtttttatctgaagacatttcctttttcaccataggccaaaaagggatcccaaatatccctttgtacattctacaaaggactgtttccaaactgctcaatccaaagacaggttcaacttttgcgatgaatgcacacatcacaaagaagtttctcagaaagcttctgtctagtttttgtgtgaagatattacttttttcaccataggcttcaaagggctcacatatatcgcaaagcagattctacaaaaagactctatccaaactggtcaaggaaaagaatacttcaaatctgtgagatgaatgtgcacatctcaaagaattttctcagaaatcttctgtctagtttttatgtgtagatatttcctttttcaccatagacctgaaaccgcctatatataaccctttgcagattctacaaaaagactgtttccaaacggctcaatcaaagaaagcttctactctgtgagatgaatgcacatatcagagagaagtttctcagaaagtttctgtctagtttttatttgtcgatattccctttttcaccataggcctcaaacagctcataaataaccctttgcagattctacaataggactgtttccaaactgctcactcaaatgaaagttcagctgtgtgagatgaatgcacacatcaaaaagaagtttctcagaatgtttctgtctagtttttatgtgaagacactttttttcaccataagcctgaaagtgttcccaaattttcctttgcagattctatgaaaagactgtttccaaactgctcaatcaaaagaaaggttcaattctgtgtgatgaatgcacacatcactacgaagtttctcagaaggattctgtctagattttatttgtggatatttcctttttcacaataggcctcagaaagctcacaaatatcgctttgcttattctacaaaaagactgtttcctatctgctcaatgaaagaaaattaaactctgtgagatgaatgcatgcatcgcaaagtggtttctcagaatgcttctgtctagtttttatatgaagatatttcctttttcatcacatgcctcaaaccactcaaaaacatccatttacagattctccaaaaagactgtttccaaactgctcaatcaaaagaaagattcaagtctttgagatgcatacacccatcacaaagaagtttcccagaaaacatgagtctagtgtttatatgaagatatttccttttgcaccataagcatcaaagcattcaccaatatcactttgcaggttctacaaaaagactgtttccaaactggtgaattgaaagaaattcaaccctgtgagatgaatgcacacatcacaaagaagttcttcagaaagctgctgtctacattttatttttcgatatttcctttttcaccattggattcaaaccactgaaacatatcactttgcagattctacaaaaagactgtttccaaactgcccaatcaaaagaaaggttcaactctgtgagatgaatgcacacatcacaaagaagtttctcagatagctcttattattttgagatatgtcccatcaatacctaatttattgagagtttttagcatgaagggttgtggaattttgtaaaggccttttctgcatctattgagataatcatgtggtttttgtctttggttctgtttatatgctggattacatttattgatttgcatatattgaaccaggcttgcatcccagagatgaagcccacttgttcatcgtggataagcttttggatgtgctgctggattcggtttgccagtattttattgaggatttttgcatcgatgttcatcaaggatattggtctaaaattctcttttttggttgtgtctctgccaggctttggtatcaggatgatcctggcttcataaaatgagttagggaggattccctctttttctattgattggaatagtttcagaaggaatggtaccagttcctccttgtacctctggtagaattcggctgtgaatccatctgatcctggactctttttggttggtaagctattgattattaccacaatttcagatcctgttattggtctattcagagattcaaatttttcctgggttagtcttgagagggtgtatatgtcgaagaatttatccatttcttctagattttctagtttatttgcatagaggtgtttgtagtattctctgatggtagtttgtatttctgtgggatcagtggtgatatcccctttatcattttttattgcatttatttgattcttctcttttttcttctttattaatcttgctagcggtctatcaattttgttgatcctttcaaaaaaccagctcctggattcattaattttttgaagggtttttttttgtctctatttctttcagttctgctctgattttagttatttcttgccttctgctagcttttgaatgtgtttgctcttgcttttctagttcttttaattgtgatgttagggtgtcaattttggatctttcctgctttctcttgtgggcatttagtgctataaatttccctctaaacactgctttgaatgtgtcccagagattctggtatgttgtgtctttgttcttgttggtttcatgctgctataaagacacatgcacgtgtatgtttattgtggcactattcacaatagcaaagacttggaaccaacccaaatgtccaacaatgatagactggattaagaaaatgtggcacatatacactatggaatactatggagccataaaaagtgatgagttcatgtcctttgtagggacatggatgaaataggaaatcatcattctaagtaaactatcacaaggacaaaaaaccaaacactcacatgttctcactcataggtgagatttgaacaatgagaacacatggacacagcaagggtcacatcacactctggggactgttgtggggtgtggggaggggggagggatagcattaggagatatacctaatgctaaatgatgagttaatgggtgcaggacaccagtgtggcacatgtatacatatgtaactaacctgcacattgtgcacatgtaccctaaaacttaaagtataataacaataaaataaaataaaaagaaagtgcacatcacaaagaagtttctcagaaagtttctttctagtttttatatgaagatatttcctttttcaccatagtccacaaagtgcaccaaatatcttttgcagattgtgcaaaaagaggttttccaaactgctcaatcaaaagaaaggttcaactctgtgagatgaaatcacaaatcacaaagaagttactcagaatgcttctgtctagtttttaagtgaaggtatttcctgttacaccatgggcctcaaggggctcacaaatatccttttgcagattctacaaaaagactgttacagaactgctcaatgaaaagtaagtttcaactctgtgagatgaattcacacctaaaaaagaagtttctcagaatgcttctgtctagttttatgtgaagatatttctttgtcaccataggcctcaaaccactcagaaatatccctatgcagctgttacaaaaagactgcttctaaactgctcaatgaaaagaaagattctactttgtgagatgaaaacacacatcacaaagaattttctcagaaagtttttttctagcttatatgtgaagatatttcctctttcagcataggcctcaatgggctcaaaaatatctcttttcagatactacaaaaggcctctttccaaactgctcaatcagaagaaagtttcaactctgtgagatgaaagcacacatcacaaagaagtttctcagaatatttttctagtttttatgtgaagatatttcctatttcaccataagccataaaggtcttccaaatatccctttgcagactctacaaaaagcctgtttccaaacaactcaatcaaaacaaagtttcaaatctgtgagatgaatggacatatcacaaagaagtttctcagaaggcttctgcctagtttttatgtgaagatatgactttttcaccagaggcctcaaagagctaagaaatatccctttgcagattgtacaaaaagactgtttccaaatttctcaatgaaaagacaggttcaactctgtgagatgaatgcgcatatcataaagaagtttctcagaatgcctctgtctagtttttatgtgaagttatttcctttttcaccataggccttaaatggctcccaaatatccctctgcagatactacaaaaagactacttgaaaactgttcaatcaaaggaatgcttcatctctgtgaaatgaatgcacccatccaaagaagtttttcagaatgcttctgtctagtttttatgtgaagatatttcctttttcaccacaggcctcaaagtgctccaaatatccatttgcagattctacaaaaagactgtttccaaacagctacatgaaaagaaaggttcaattctgtcagataaatgcacacatgaaaaagaagtttctcagaatgcttctgtctggtttttatctgacataattatttttcaccataggcctcaaaccgttcaaaaacatccctttgcatattgtacaaaaagactgtttctaaactgtcaaatgcaaagaaaggttcaactctgtgagatgaaaccacacatcacaaagaagttcctcataatgcttctgtctggtttttatgtgaagatatttcatatttcaccataggcctcaaagagctcacaaatatccctttgcagactctacaaaaagactgttttcgaactgctccatgcaaagaaaggttcaactctgtgagacgaatgcacacataaaaaagaagttactcagaatgcttctgtctagtttttttgtgaagatatttctttttcaccatagacatcaaaccattcagaaatatccctttgtacattgtacaaaaagactgtttccaaactgttcaatcaaaagaaaggctcaaacctgtgagatgaaagcacacatcacaaagaagtttctcagaatgtttctgtctaatttttatgggaggatatttctttttcaccataggaatcaaacccctcagaaatatccctttgcagattgtagataaagaatttttcctaactgctcaatcaaaagaacagttcaagtctgtgagatgaaagcacacatcacaaagaagtttctcagaaatcttctgtctagtttttatgtgaagatatttcccttctaacgataggcctcaaagaaatccaaatatcaatttgcagattctacaaaatagtgtttccaaactgctcaatcaaaagaaattttcaactctgtgagatgaaaacacacatcacaaagaagttcttcagaaagtttctcactagattttatgtgaagatatttagtttttcaccacaagccacaaagtgctccaaatatccatttgcagatacttcaaaaagagtttttccaaactgctcaatcaaaagaaaatttcaactctgtgagatgaatgcaaacatcacaaagaagtttctcggtatgcttctgtatagtttttctgtgaagatatttcccatttcaccatgggcctcagtgggctcacatatatccttttgcaaattctacaaaagattgtttccgaatttctcaatgaaaagaaagattcatctctgggagatgaatgcacacatgaataagaagtttctcagaatgcttctgtctagtttctgtgttaagatatttgtttttcaccataggcctcaaactgctcagaaatattcctttgcagattgtacaaaaagattgtttccaaactgctcaatgaaaacaaaggttcaacactgtgacatgaatactcacatcacagagaagtttttcagaaagcttctgtttagtttttaagtgaaaatatttcctttttcaccataggcctcaaagcactccaaatatccttttgcaaactctacaaaaagagagtttccaactgttcaattaaaagaaagattcgaatctgtgaaaagaaagtacacatcacgaagaagtttctcataatgcttctctctactttttttgtgaagatatttcctatatcaccatgagcctcaaagatctcacaaataccccattgcagattctacaaagacagttttcgaactgctaaatgaaaagaaatgttcaactctgtgagacgaatgcacacataataaattaggttatcataatgcttctgtctagtttttatgtgaagatatttctttttcaccataggcatcaaaccgttcagaaatatcactttgtagattgtacaaaaagactgtttctaaactgctcaatcaaaagaaaatttcaaactggtgagatgaatgcacacataacaaaggagtttctcaggaatcttttttttttattttcaacacttttttatttctttcaaagttagttttttaatttattattattatattttaagttttagggtacatgtgcacaatgtgcaggtttgttacatatgtatacatgtgccatgctggtgtgctgcacccactaactcgtcatctagcattaggtatatctcccaatgctatccctcccccttccccccaccccacaacagtccccagagtgtgatattccccttcctgtgtccatatgttgctctcattgttcaattcccacccatgagtgagaatatgcggtgtttggttttttgttcttgcgatagtttactgagaatggtgatttccaatttcatctatgtccctacaaagtacatgaactcatcatttattatagctgcatagtattccatggtgtatatgtgccacattttcttaatccagtcttctgtcttgtttttagtgaacatattacctttctcaacataggcctcaaagcaatccaaacatccatttgcagattcaacaaaaagactgcttccaaactaatcaatcaaaacaaatttttacctctgtgagatgaaagcacacatcacaaaaaagttactcagacagcttctctctagtttgtatgtgaagatattttctattttacctgaggtcataaagggctcacaaatatccctttgaagcttctacaaaaagactgtttccaaactgctcaatcaaaagaaagtttcaactctgtgagatgaatggacacatcacaaagaaatttcttggaatgattctgtctagtttttatgtgaagatatttctctttcaccataggtctcaaaatgatcagaattatccctttgcagattgttcaataaacctctttctaacctgctcaataaaaagaaaggttcaactctgtgagatgaatgcacacattacaaggaagtttctcagaaagcttctgtttagtttttatgtgaggatattgcgtttttcaccatgggcctcaatagcgctcaaaatatccatttgcagattctagataaagagtgtttccaaactcctcaatcaaaagaaagtttcaattctgtgagatgaaagcacacatcacaaagaagtttcttagaaagcttctttctagtttttatgtgaagatatttcacattgcaccatagtactcaatgcgctcagaaatattcctttgcagattctacaaaagggctgtttccaaactgctcaatccaaagaaagtttcaactatgtgagatgaatgcacacatcaaaaagaagtttctcagaatgcttctttctagtttatatgtgaagaaaattcctatttcaccataggcaataaagggctcacaaatatttttttgcagattctacaaaaagactgtatccaaactgctcaataaaaagaaagtttcaactctgttagattaatggacacatcaaaaagtaatttctcagaaaatttctgtttagtttttatgtgaggatatttcctttgtcaccattgacctcaaagcactcctaatatccatttacagatatcacaaaaagagtgtttccaaactgctgaatcaaaagaaagttttaactctgtgagatgaaagcacacatctcaaagaactttctcagaaagcttcggtctagttttcatgtgaagatatttccagtttcaccataggcctcaaagggctaagaaatatccctttccagtttctaaaagacaaccatttccatactgctcaatcaaaagaaagcttaaattctgtgaggtgaatgcacacatgagaatgaagtttctcagaactctcctgtctagtttttatgtgacgatatttactatgtcactataagcttcaaatgtctcaaaaatatccctttgcagattctacaaaaatatggtttcaaaagtgtgaattaaaagaaaccttcaaatctgtcagatgaatggagacatcacaaagaagttcctcagaatgcttctgtctagtttaaatatgaagatatttctttttcacatagacctcaaatggctcagaaatacacctttgcagaatgcaggaaaagactgtttctaaactgctcaaacaaaataaagtttcaacactgtgagatgaatgcacacatcacaaagaagtttctcagaatgcttctgtgtggttattatgtgaaggtatttcctttttcaccatgggcctgaaagcactccaaatatccacttgcagattctacaaaaagagtgttttcaaactgctcaatgaaaagaaaggttcaactctgtgagatgaaagcacacttcacagaagtgtttcttagaaaccttctatctagtttttatgtgaagatatttcatatttcaaaataggtctcaatgggctcagaagtatactcttgcagatgctacaaaaagagtgtttccaaaaagctcaatcaaaagaaaggtttaacactgtaagataaatgcacacattacaaagaagtctctcagaattcttctgtatagtttttttgagaagccacttcttttttcactgtaagcctgtccgctcactaatagccctctgcagatactacaaaagactctttccaaactgctcaatcaaaataaagtttcacatctgtgagatgaaagcccacgtcacaaagaactttctcagaaagtttccgtctagtttttatgtgaagatatttcctatttctccttaggcctcaaagggatcacaaatatccctattcagattctacaaaaaactgtttccgaactgcttcatcaaaagaaaggttcaactctgtgagatcaatgcacacatgcaaaattagtttatcagaatgtttctgtccagtttttatttgaagttattactttttcaccataggtctcaaaccgcaaacaaatattcctttgcagattgcacaaaaagcatgtttccacactgctcaatgaactgaaaggttcaactcagtgagatgaatgcaaacatcacaaagagttttctcaaaatgcttctgtctaggttttagatgaagatatttactttttcaccataggcctcaaactgctgacaaatatccctttgcagattctacaaaacgagttgttgccaaacttctcaatgaaaagcaaggtccaaatctgtgagatgaaagcacacatcacaaagaagtttctcagaaagtttctgtctagtttttaaatgcagatattttctttttcactataggcctcaaagcactccaaatatccatttgcaatttctacaaaaagagtgtttccaaactgctcactcaaaagagaggttcaactctttgtggtgaaagcacacagtacaaagaagttttacaaaaagcttctgcctagtttttatgtgaagacatttcctatttcaccataggccccaatgggctcacaaacatccctttgcagattctgcaaaagaattctttccaaactgctcaatccacagaaagttttaactctgtgacatgaatgcacacatcacaaagaagtttctcagaatgcttctgtctagtttttatgtgaagaaatttcctgttcaccataggcctgaaatgctgcaaatatccatcttcagattctacaaaaagaatgtttacaaactgctcaatcaaagaaaagttcaactctgtgagatgaaagcacacaacacaaagaagtttctccaaaagcttcggtctagtttttttgtgaagatattccctatttcaccacagtcctgaaagggctcacaaatatccttttgcacattatacaaaaagactgtccccaaactgctcaatcaaaagaaagtttcaactctgtgtgatgaatgcacacattacaaagaagtttctcagaatgcttttgctagtttttatatgaagatatttctctttcacagtaggcctcaaatggctcagaaatatccctttgcagattgtacaaaaagaccgtttccaaactgctcaatcaaaagaaagtttcaacactgtgagatgaatgcacacatcacaaagaagtttctcagaatgcttctgttaagatttcgtgtgaagatatttcctttttcaccataggcctcaatgggctcagaagtattactttgtagattttacaaaaggtctgtttagaaaactgctgaatccaaagaaagattcaactctgtgagatgaatgcacacattacaaagaagttttgcagaatgcatctgtctagtttttatgtgcagatatttcttttttcaccataggcctcaaagcgctccaaatacccatttgtagattctacaaaaagagtgtttccaaactgctcaatcaaaagaaaggttcaaacctgtgacacggaagcaaacatcacaaagtagtctctcagaaagcttctgtctattttttatgtgacgatatttcctatttcaccatgggccgtataaggctcacaaaatttttttgtaaattctgcaaaaagactgtttccaaactgctcaatccaagggaagtttcaactctgtgagatgaatggacacaccacaaaaaagtttatcagaatgcttctatctactttttatgggaagacatttctttttcaccctaggcttcaatgggctcagaaatatccctttgcagattctacaaaaggactgtttccaaactgctcaatcaaagaaaggttcaactctgtgagatgaatgcacacatcacagagatgtttctcacaatgcttctgtctattttttatgtgaagttattcaccttttcaccataggcctcaaagcactccaaacatccatttgctgattccgcaaaaagactgtttcaaaactgctcaatgaaaagaaagctacaactccgtgtgttgaaagtacacatcacaaagaagtttctcagaaagcttatgtctagtttttctttgaggatattttctgtttcaccatgggccataaagggcccaaaaatatttttcacagattctacaaaaagactatttccaaactgctcaatccaaagaaagtttcaactctgtgagatgaatggacacaatacaaagaagtttctcagaatacttctgtctagggtttacatgagatatttcctttttcaccacaagcctcaaagcgctccaaatatccatttgcagattccacaaaaagactgtttccaagttgctcaatgaaaagaaagtttcaactctgtgaggtgaaaacacacatcacaaagaagtttctcagaatgtatctttctagattttttgtgaagatatttcctttttcaacataggcctcaaagcactccaagtatctatttgcagattctaccaaaagactgtttacaaactgctaaatcaaaagaaagtttcagctctgtgatatgaatgcagacatcacaaagaagtttctcagaaagcttctgtttagtgtttatctgaagatatttcctttttctccataggcctcaaagctctccaaatatgcatttccagattctataaaaagtctgtttccaaactgctcaatgaaaagaaaggttcaactctgtgagatgaaagtacatatcacaaagaagtttctcagaatgtttctttctagttttttttggaagatatttcctttttcactatagaactcagagcactccaaatacccatttgcagattctacaaaaaagactgtttacaaactgctcaatcaaaagaagttttcaacgctgtgagatgaatgcacacattacaaagtagtttctcagaaagcttctgtttagtttttatgtgaagatatttcctttttcaccataggcctcaaaacgctccaattatccatttgcagattatgcaaaaagagtgtttccaaactgctcattcaaaagaaacacttaactctttgagatgagagcactcattaaaaataagtttctcagaaagtttctgtctagcttttatgtgaagatatttccaatatcaccaaaggcctcaatcggctgagaagtattcctttggggattctacaataggactgtttccaaagtgctctagcaaaggaaaggttcaactctgtgagatgaatgcacgcatcactaaaacgtttctcagaaaatttctgtgtagtttttatgtgaagatatttcctacttcaccctaggcctcaaagggttcacaattatccctttatagattttacaaaaagactgtttccaaatcttcaatcaaagaaatgttcaaatgtgtgaaatgaatccaaccctcacaaagaagtttctcagaattnnnnnnnnnnnnnnnnnnnnnnnnnnnnnnnnnnnnnnnnnnnnnnnnnnnnnnnnnnnnnnnnnnnnnnnnnnnnnnnnnnnnnnnnnnnnnnnnnnnnnnnnnnnnnnnnnnnnnnnnnnnnnnnnnnnnnnnnnnnnnnnnnnnnnnnnnnnnnnnnnnnnnnnnnnnnnnnnnnnnnnnnnnnnnnnnnnnnnnnnnnnnnnnnnnnnnnnnnnnnnnnnnnnnnnnnnnnnnnnnnnnnnnnnnnnnnnnnnnnnnnnnnnnnnnnnnnnnnnnnnnnnnnnnnnnnnnnnnnnnnnnnnnnnnnnnnnnnnnnnnnnnnnnnnnnnnnnnnnnnnnnnnnnnnnnnnnnnnnnnnnnnnnnnnnnnnnnnnnnnnnnnnnnnnnnnnnnnnnnnnnnnnnnnnnnnnnnnnnnnnnnnnnnnnnnnnnnnnnnnnnnnnnnnnnnnnnnnnnnnnnnnnnnnnnnnnnnnnnnnnnnnnnnnnnnnnnnnnnnnnnnnnnnnnnnnnnnnnnnnnnnnnnnnnnnnnnnnnnnnnnnnnnnnnnnnnnnnnnnnnnnnnnnnnnnnnnnnnnnnnnnnnnnnnnnnnnnnnnnnnnnnnnnnnnnnnnnnnnnnnnnnnnnnnnnnnnnnnnnnnnnnnnnnnnnnnnnnnnnnnnnnnnnnnnnnnnnnnnnnnnnnnnnnnnnnnnnnnnnnnnnnnnnnnnnnnnnnnnnnnnnnnnnnnnnnnnnnnnnnnnnnnnnnnnnnnnnnnnnnnnnnnnnnnnnnnnnnnnnnnnnnnnnnnnnnnnnnnnnnnnnnnnnnnnnnnnnnnnnnnnnnnnnnnnnnnnnnnnnnnnnnnnnnnnnnnnnnnnnnnnnnnnnnnnnnnnnnnnnnnnnnnnnnnnnnnnnnnnnnnnnnnnnnnnnnnnnnnnnnnnnnnnnnnnnnnnnnnnnnnnnnnnnnnnnnnnnnnnnnnnnnnnnnnnnnnnnnnnnnnnnnnnnnnnnnnnnnnnnnnnnnnnnnnnnnnnnnnnnnnnnnnnnnnnnnnnnnnnnnnnnnnnnnnnnnnnnnnnnnnnnnnnnnnnnnnnnnnnnnnnnnnnnnnnnnnnnnnnnnnnnnnnnnnnnnnnnnnnnnnnnnnnnnnnnnnnnnnnnnnnnnnnnnnnnnnnnnnnnnnnnnnnnnnnnnnnnnnnnnnnnnnnnnnnnnnnnnnnnnnnnnnnnnnnnnnnnnnnnnnnnnnnnnnnnnnnnnnnnnnnnnnnnnnnnnnnnnnnnnnnnnnnnnnnnnnnnnnnnnnnnnnnnnnnnnnnnnnnnnnnnnnnnnnnnnnnnnnnnnnnnnnnnnnnnnnnnnnnnnnnnnnnnnnnnnnnnnnnnnnnnnnnnnnnnnnnnnnnnnnnnnnnnnnnnnnnnnnnnnnnnnnnnnnnnnnnnnnnnnnnnnnnnnnnnnnnnnnnnnnnnnnnnnnnnnnnnnnnnnnnnnnnnnnnnnnnnnnnnnnnnnnnnnnnnnnnnnnnnnnnnnnnnnnnnnnnnnnnnnnnnnnnnnnnnnnnnnnnnnnnnnnnnnnnnnnnnnnnnnnnnnnnnnnnnnnnnnnnnnnnnnnnnnnnnnnnnnnnnnnnnnnnnnnnnnnnnnnnnnnnnnnnnnnnnnnnnnnnnnnnnnnnnnnnnnnnnnnnnnnnnnnnnnnnnnnnnnnnnnnnnnnnnnnnnnnnnnnnnnnnnnnnnnnnnnnnnnnnnnnnnnnnnnnnnnnnnnnnnnnnnnnnnnnnnnnnnnnnnnnnnnnnnnnnnnnnnnnnnnnnnnnnnnnnnnnnnnnnnnnnnnnnnnnnnnnnnnnnnnnnnnnnnnnnnnnnnnnnnnnnnnnnnnnnnnnnnnnnnnnnnnnnnnnnnnnnnnnnnnnnnnnnnnnnnnnnnnnnnnnnnnnnnnnnnnnnnnnnnnnnnnnnnnnnnnnnnnnnnnnnnnnnnnnnnnnnnnnnnnnnnnnnnnnnnnnnnnnnnnnnnnnnnnnnnnnnnnnnnnnnnnnnnnnnnnnnnnnnnnnnnnnnnnnnnnnnnnnnnnnnnnnnnnnnnnnnnnnnnnnnnnnnnnnnnnnnnnnnnnnnnnnnnnnnnnnnnnnnnnnnnnnnnnnnnnnnnnnnnnnnnnnnnnnnnnnnnnnnnnnnnnnnnnnnnnnnnnnnnnnnnnnnnnnnnnnnnnnnnnnnnnnnnnnnnnnnnnnnnnnnnnnnnnnnnnnnnnnnnnnnnnnnnnnnnnnnnnnnnnnnnnnnnnnnnnnnnnnnnnnnnnnnnnnnnnnnnnnnnnnnnnnnnnnnnnnnnnnnnnnnnnnnnnnnnnnnnnnnnnnnnnnnnnnnnnnnnnnnnnnnnnnnnnnnnnnnnnnnnnnnnnnnnnnnnnnnnnnnnnnnnnnnnnnnnnnnnnnnnnnnnnnnnnnnnnnnnnnnnnnnnnnnnnnnnnnnnnnnnnnnnnnnnnnnnnnnnnnnnnnnnnnnnnnnnnnnnnnnnnnnnnnnnnnnnnnnnnnnnnnnnnnnnnnnnnnnnnnnnnnnnnnnnnnnnnnnnnnnnnnnnnnnnnnnnnnnnnnnnnnnnnnnnnnnnnnnnnnnnnnnnnnnnnnnnnnnnnnnnnnnnnnnnnnnnnnnnnnnnnnnnnnnnnnnnnnnnnnnnnnnnnnnnnnnnnnnnnnnnnnnnnnnnnnnnnnnnnnnnnnnnnnnnnnnnnnnnnnnnnnnnnnnnnnnnnnnnnnnnnnnnnnnnnnnnnnnnnnnnnnnnnnnnnnnnnnnnnnnnnnnnnnnnnnnnnnnnnnnnnnnnnnnnnnnnnnnnnnnnnnnnnnnnnnnnnnnnnnnnnnnnnnnnnnnnnnnnnnnnnnnnnnnnnnnnnnnnnnnnnnnnnnnnnnnnnnnnnnnnnnnnnnnnnnnnnnnnnnnnnnnnnnnnnnnnnnnnnnnnnnnnnnnnnnnnnnnnnnnnnnnnnnnnnnnnnnnnnnnnnnnnnnnnnnnnnnnnnnnnnnnnnnnnnnnnnnnnnnnnnnnnnnnnnnnnnnnnnnnnnnnnnnnnnnnnnnnnnnnnnnnnnnnnnnnnnnnnnnnnnnnnnnnnnnnnnnnnnnnnnnnnnnnnnnnnnnnnnnnnnnnnnnnnnnnnnnnnnnnnnnnnnnnnnnnnnnnnnnnnnnnnnnnnnnnnnnnnnnnnnnnnnnnnnnnnnnnnnnnnnnnnnnnnnnnnnnnnnnnnnnnnnnnnnnnnnnnnnnnnnnnnnnnnnnnnnnnnnnnnnnnnnnnnnnnnnnnnnnnnnnnnnnnnnnnnnnnnnnnnnnnnnnnnnnnnnnnnnnnnnnnnnnnnnnnnnnnnnnnnnnnnnnnnnnnnnnnnnnnnnnnnnnnnnnnnnnnnnnnnnnnnnnnnnnnnnnnnnnnnnnnnnnnnnnnnnnnnnnnnnnnnnnnnnnnnnnnnnnnnnnnnnnnnnnnnnnnnnnnnnnnnnnnnnnnnnnnnnnnnnnnnnnnnnnnnnnnnnnnnnnnnnnnnnnnnnnnnnnnnnnnnnnnnnnnnnnnnnnnnnnnnnnnnnnnnnnnnnnnnnnnnnnnnnnnnnnnnnnnnnnnnnnnnnnnnnnnnnnnnnnnnnnnnnnnnnnnnnnnnnnnnnnnnnnnnnnnnnnnnnnnnnnnnnnnnnnnnnnnnnnnnnnnnnnnnnnnnnnnnnnnnnnnnnnnnnnnnnnnnnnnnnnnnnnnnnnnnnnnnnnnnnnnnnnnnnnnnnnnnnnnnnnnnnnnnnnnnnnnnnnnnnnnnnnnnnnnnnnnnnnnnnnnnnnnnnnnnnnnnnnnnnnnnnnnnnnnnnnnnnnnnnnnnnnnnnnnnnnnnnnnnnnnnnnnnnnnnnnnnnnnnnnnnnnnnnnnnnnnnnnnnnnnnnnnnnnnnnnnnnnnnnnnnnnnnnnnnnnnnnnnnnnnnnnnnnnnnnnnnnnnnnnnnnnnnnnnnnnnnnnnnnnnnnnnnnnnnnnnnnnnnnnnnnnnnnnnnnnnnnnnnnnnnnnnnnnnnnnnnnnnnnnnnnnnnnnnnnnnnnnnnnnnnnnnnnnnnnnnnnnnnnnnnnnnnnnnnnnnnnnnnnnnnnnnnnnnnnnnnnnnnnnnnnnnnnnnnnnnnnnnnnnnnnnnnnnnnnnnnnnnnnnnnnnnnnnnnnnnnnnnnnnnnnnnnnnnnnnnnnnnnnnnnnnnnnnnnnnnnnnnnnnnnnnnnnnnnnnnnnnnnnnnnnnnnnnnnnnnnnnnnnnnnnnnnnnnnnnnnnnnnnnnnnnnnnnnnnnnnnnnnnnnnnnnnnnnnnnnnnnnnnnnnnnnnnnnnnnnnnnnnnnnnnnnnnnnnnnnnnnnnnnnnnnnnnnnnnnnnnnnnnnnnnnnnnnnnnnnnnnnnnnnnnnnnnnnnnnnnnnnnnnnnnnnnnnnnnnnnnnnnnnnnnnnnnnnnnnnnnnnnnnnnnnnnnnnnnnnnnnnnnnnnnnnnnnnnnnnnnnnnnnnnnnnnnnnnnnnnnnnnnnnnnnnnnnnnnnnnnnnnnnnnnnnnnnnnnnnnnnnnnnnnnnnnnnnnnnnnnnnnnnnnnnnnnnnnnnnnnnnnnnnnnnnnnnnnnnnnnnnnnnnnnnnnnnnnnnnnnnnnnnnnnnnnnnnnnnnnnnnnnnnnnnnnnnnnnnnnnnnnnnnnnnnnnnnnnnnnnnnnnnnnnnnnnnnnnnnnnnnnnnnnnnnnnnnnnnnnnnnnnnnnnnnnnnnnnnnnnnnnnnnnnnnnnnnnnnnnnnnnnnnnnnnnnnnnnnnnnnnnnnnnnnnnnnnnnnnnnnnnnnnnnnnnnnnnnnnnnnnnnnnnnnnnnnnnnnnnnnnnnnnnnnnnnnnnnnnnnnnnnnnnnnnnnnnnnnnnnnnnnnnnnnnnnnnnnnnnnnnnnnnnnnnnnnnnnnnnnnnnnnnnnnnnnnnnnnnnnnnnnnnnnnnnnnnnnnnnnnnnnnnnnnnnnnnnnnnnnnnnnnnnnnnnnnnnnnnnnnnnnnnnnnnnnnnnnnnnnnnnnnnnnnnnnnnnnnnnnnnnnnnnnnnnnnnnnnnnnnnnnnnnnnnnnnnnnnnnnnnnnnnnnnnnnnnnnnnnnnnnnnnnnnnnnnnnnnnnnnnnnnnnnnnnnnnnnnnnnnnnnnnnnnnnnnnnnnnnnnnnnnnnnnnnnnnnnnnnnnnnnnnnnnnnnnnnnnnnnnnnnnnnnnnnnnnnnnnnnnnnnnnnnnnnnnnnnnnnnnnnnnnnnnnnnnnnnnnnnnnnnnnnnnnnnnnnnnnnnnnnnnnnnnnnnnnnnnnnnnnnnnnnnnnnnnnnnnnnnnnnnnnnnnnnnnnnnnnnnnnnnnnnnnnnnnnnnnnnnnnnnnnnnnnnnnnnnnnnnnnnnnnnnnnnnnnnnnnnnnnnnnnnnnnnnnnnnnnnnnnnnnnnnnnnnnnnnnnnnnnnnnnnnnnnnnnnnnnnnnnnnnnnnnnnnnnnnnnnnnnnnnnnnnnnnnnnnnnnnnnnnnnnnnnnnnnnnnnnnnnnnnnnnnnnnnnnnnnnnnnnnnnnnnnnnnnnnnnnnnnnnnnnnnnnnnnnnnnnnnnnnnnnnnnnnnnnnnnnnnnnnnnnnnnnnnnnnnnnnnnnnnnnnnnnnnnnnnnnnnnnnnnnnnnnnnnnnnnnnnnnnnnnnnnnnnnnnnnnnnnnnnnnnnnnnnnnnnnnnnnnnnnnnnnnnnnnnnnnnnnnnnnnnnnnnnnnnnnnnnnnnnnnnnnnnnnnnnnnnnnnnnnnnnnnnnnnnnnnnnnnnnnnnnnnnnnnnnnnnnnnnnnnnnnnnnnnnnnnnnnnnnnnnnnnnnnnnnnnnnnnnnnnnnnnnnnnnnnnnnnnnnnnnnnnnnnnnnnnnnnnnnnnnnnnnnnnnnnnnnnnnnnnnnnnnnnnnnnnnnnnnnnnnnnnnnnnnnnnnnnnnnnnnnnnnnnnnnnnnnnnnnnnnnnnnnnnnnnnnnnnnnnnnnnnnnnnnnnnnnnnnnnnnnnnnnnnnnnnnnnnnnnnnnnnnnnnnnnnnnnnnnnnnnnnnnnnnnnnnnnnnnnnnnnnnnnnnnnnnnnnnnnnnnnnnnnnnnnnnnnnnnnnnnnnnnnnnnnnnnnnnnnnnnnnnnnnnnnnnnnnnnnnnnnnnnnnnnnnnnnnnnnnnnnnnnnnnnnnnnnnnnnnnnnnnnnnnnnnnnnnnnnnnnnnnnnnnnnnnnnnnnnnnnnnnnnnnnnnnnnnnnnnnnnnnnnnnnnnnnnnnnnnnnnnnnnnnnnnnnnnnnnnnnnnnnnnnnnnnnnnnnnnnnnnnnnnnnnnnnnnnnnnnnnnnnnnnnnnnnnnnnnnnnnnnnnnnnnnnnnnnnnnnnnnnnnnnnnnnnnnnnnnnnnnnnnnnnnnnnnnnnnnnnnnnnnnnnnnnnnnnnnnnnnnnnnnnnnnnnnnnnnnnnnnnnnnnnnnnnnnnnnnnnnnnnnnnnnnnnnnnnnnnnnnnnnnnnnnnnnnnnnnnnnnnnnnnnnnnnnnnnnnnnnnnnnnnnnnnnnnnnnnnnnnnnnnnnnnnnnnnnnnnnnnnnnnnnnnnnnnnnnnnnnnnnnnnnnnnnnnnnnnnnnnnnnnnnnnnnnnnnnnnnnnnnnnnnnnnnnnnnnnnnnnnnnnnnnnnnnnnnnnnnnnnnnnnnnnnnnnnnnnnnnnnnnnnnnnnnnnnnnnnnnnnnnnnnnnnnnnnnnnnnnnnnnnnnnnnnnnnnnnnnnnnnnnnnnnnnnnnnnnnnnnnnnnnnnnnnnnnnnnnnnnnnnnnnnnnnnnnnnnnnnnnnnnnnnnnnnnnnnnnnnnnnnnnnnnnnnnnnnnnnnnnnnnnnnnnnnnnnnnnnnnnnnnnnnnnnnnnnnnnnnnnnnnnnnnnnnnnnnnnnnnnnnnnnnnnnnnnnnnnnnnnnnnnnnnnnnnnnnnnnnnnnnnnnnnnnnnnnnnnnnnnnnnnnnnnnnnnnnnnnnnnnnnnnnnnnnnnnnnnnnnnnnnnnnnnnnnnnnnnnnnnnnnnnnnnnnnnnnnnnnnnnnnnnnnnnnnnnnnnnnnnnnnnnnnnnnnnnnnnnnnnnnnnnnnnnnnnnnnnnnnnnnnnnnnnnnnnnnnnnnnnnnnnnnnnnnnnnnnnnnnnnnnnnnnnnnnnnnnnnnnnnnnnnnnnnnnnnnnnnnnnnnnnnnnnnnnnnnnnnnnnnnnnnnnnnnnnnnnnnnnnnnnnnnnnnnnnnnnnnnnnnnnnnnnnnnnnnnnnnnnnnnnnnnnnnnnnnnnnnnnnnnnnnnnnnnnnnnnnnnnnnnnnnnnnnnnnnnnnnnnnnnnnnnnnnnnnnnnnnnnnnnnnnnnnnnnnnnnnnnnnnnnnnnnnnnnnnnnnnnnnnnnnnnnnnnnnnnnnnnnnnnnnnnnnnnnnnnnnnnnnnnnnnnnnnnnnnnnnnnnnnnnnnnnnnnnnnnnnnnnnnnnnnnnnnnnnnnnnnnnnnnnnnnnnnnnnnnnnnnnnnnnnnnnnnnnnnnnnnnnnnnnnnnnnnnnnnnnnnnnnnnnnnnnnnnnnnnnnnnnnnnnnnnnnnnnnnnnnnnnnnnnnnnnnnnnnnnnnnnnnnnnnnnnnnnnnnnnnnnnnnnnnnnnnnnnnnnnnnnnnnnnnnnnnnnnnnnnnnnnnnnnnnnnnnnnnnnnnnnnnnnnnnnnnnnnnnnnnnnnnnnnnnnnnnnnnnnnnnnnnnnnnnnnnnnnnnnnnnnnnnnnnnnnnnnnnnnnnnnnnnnnnnnnnnnnnnnnnnnnnnnnnnnnnnnnnnnnnnnnnnnnnnnnnnnnnnnnnnnnnnnnnnnnnnnnnnnnnnnnnnnnnnnnnnnnnnnnnnnnnnnnnnnnnnnnnnnnnnnnnnnnnnnnnnnnnnnnnnnnnnnnnnnnnnnnnnnnnnnnnnnnnnnnnnnnnnnnnnnnnnnnnnnnnnnnnnnnnnnnnnnnnnnnnnnnnnnnnnnnnnnnnnnnnnnnnnnnnnnnnnnnnnnnnnnnnnnnnnnnnnnnnnnnnnnnnnnnnnnnnnnnnnnnnnnnnnnnnnnnnnnnnnnnnnnnnnnnnnnnnnnnnnnnnnnnnnnnnnnnnnnnnnnnnnnnnnnnnnnnnnnnnnnnnnnnnnnnnnnnnnnnnnnnnnnnnnnnnnnnnnnnnnnnnnnnnnnnnnnnnnnnnnnnnnnnnnnnnnnnnnnnnnnnnnnnnnnnnnnnnnnnnnnnnnnnnnnnnnnnnnnnnnnnnnnnnnnnnnnnnnnnnnnnnnnnnnnnnnnnnnnnnnnnnnnnnnnnnnnnnnnnnnnnnnnnnnnnnnnnnnnnnnnnnnnnnnnnnnnnnnnnnnnnnnnnnnnnnnnnnnnnnnnnnnnnnnnnnnnnnnnnnnnnnnnnnnnnnnnnnnnnnnnnnnnnnnnnnnnnnnnnnnnnnnnnnnnnnnnnnnnnnnnnnnnnnnnnnnnnnnnnnnnnnnnnnnnnnnnnnnnnnnnnnnnnnnnnnnnnnnnnnnnnnnnnnnnnnnnnnnnnnnnnnnnnnnnnnnnnnnnnnnnnnnnnnnnnnnnnnnnnnnnnnnnnnnnnnnnnnnnnnnnnnnnnnnnnnnnnnnnnnnnnnnnnnnnnnnnnnnnnnnnnnnnnnnnnnnnnnnnnnnnnnnnnnnnnnnnnnnnnnnnnnnnnnnnnnnnnnnnnnnnnnnnnnnnnnnnnnnnnnnnnnnnnnnnnnnnnnnnnnnnnnnnnnnnnnnnnnnnnnnnnnnnnnnnnnnnnnnnnnnnnnnnnnnnnnnnnnnnnnnnnnnnnnnnnnnnnnnnnnnnnnnnnnnnnnnnnnnnnnnnnnnnnnnnnnnnnnnnnnnnnnnnnnnnnnnnnnnnnnnnnnnnnnnnnnnnnnnnnnnnnnnnnnnnnnnnnnnnnnnnnnnnnnnnnnnnnnnnnnnnnnnnnnnnnnnnnnnnnnnnnnnnnnnnnnnnnnnnnnnnnnnnnnnnnnnnnnnnnnnnnnnnnnnnnnnnnnnnnnnnnnnnnnnnnnnnnnnnnnnnnnnnnnnnnnnnnnnnnnnnnnnnnnnnnnnnnnnnnnnnnnnnnnnnnnnnnnnnnnnnnnnnnnnnnnnnnnnnnnnnnnnnnnnnnnnnnnnnnnnnnnnnnnnnnnnnnnnnnnnnnnnnnnnnnnnnnnnnnnnnnnnnnnnnnnnnnnnnnnnnnnnnnnnnnnnnnnnnnnnnnnnnnnnnnnnnnnnnnnnnnnnnnnnnnnnnnnnnnnnnnnnnnnnnnnnnnnnnnnnnnnnnnnnnnnnnnnnnnnnnnnnnnnnnnnnnnnnnnnnnnnnnnnnnnnnnnnnnnnnnnnnnnnnnnnnnnnnnnnnnnnnnnnnnnnnnnnnnnnnnnnnnnnnnnnnnnnnnnnnnnnnnnnnnnnnnnnnnnnnnnnnnnnnnnnnnnnnnnnnnnnnnnnnnnnnnnnnnnnnnnnnnnnnnnnnnnnnnnnnnnnnnnnnnnnnnnnnnnnnnnnnnnnnnnnnnnnnnnnnnnnnnnnnnnnnnnnnnnnnnnnnnnnnnnnnnnnnnnnnnnnnnnnnnnnnnnnnnnnnnnnnnnnnnnnnnnnnnnnnnnnnnnnnnnnnnnnnnnnnnnnnnnnnnnnnnnnnnnnnnnnnnnnnnnnnnnnnnnnnnnnnnnnnnnnnnnnnnnnnnnnnnnnnnnnnnnnnnnnnnnnnnnnnnnnnnnnnnnnnnnnnnnnnnnnnnnnnnnnnnnnnnnnnnnnnnnnnnnnnnnnnnnnnnnnnnnnnnnnnnnnnnnnnnnnnnnnnnnnnnnnnnnnnnnnnnnnnnnnnnnnnnnnnnnnnnnnnnnnnnnnnnnnnnnnnnnnnnnnnnnnnnnnnnnnnnnnnnnnnnnnnnnnnnnnnnnnnnnnnnnnnnnnnnnnnnnnnnnnnnnnnnnnnnnnnnnnnnnnnnnnnnnnnnnnnnnnnnnnnnnnnnnnnnnnnnnnnnnnnnnnnnnnnnnnnnnnnnnnnnnnnnnnnnnnnnnnnnnnnnnnnnnnnnnnnnnnnnnnnnnnnnnnnnnnnnnnnnnnnnnnnnnnnnnnnnnnnnnnnnnnnnnnnnnnnnnnnnnnnnnnnnnnnnnnnnnnnnnnnnnnnnnnnnnnnnnnnnnnnnnnnnnnnnnnnnnnnnnnnnnnnnnnnnnnnnnnnnnnnnnnnnnnnnnnnnnnnnnnnnnnnnnnnnnnnnnnnnnnnnnnnnnnnnnnnnnnnnnnnnnnnnnnnnnnnnnnnnnnnnnnnnnnnnnnnnnnnnnnnnnnnnnnnnnnnnnnnnnnnnnnnnnnnnnnnnnnnnnnnnnnnnnnnnnnnnnnnnnnnnnnnnnnnnnnnnnnnnnnnnnnnnnnnnnnnnnnnnnnnnnnnnnnnnnnnnnnnnnnnnnnnnnnnnnnnnnnnnnnnnnnnnnnnnnnnnnnnnnnnnnnnnnnnnnnnnnnnnnnnnnnnnnnnnnnnnnnnnnnnnnnnnnnnnnnnnnnnnnnnnnnnnnnnnnnnnnnnnnnnnnnnnnnnnnnnnnnnnnnnnnnnnnnnnnnnnnnnnnnnnnnnnnnnnnnnnnnnnnnnnnnnnnnnnnnnnnnnnnnnnnnnnnnnnnnnnnnnnnnnnnnnnnnnnnnnnnnnnnnnnnnnnnnnnnnnnnnnnnnnnnnnnnnnnnnnnnnnnnnnnnnnnnnnnnnnnnnnnnnnnnnnnnnnnnnnnnnnnnnnnnnnnnnnnnnnnnnnnnnnnnnnnnnnnnnnnnnnnnnnnnnnnnnnnnnnnnnnnnnnnnnnnnnnnnnnnnnnnnnnnnnnnnnnnnnnnnnnnnnnnnnnnnnnnnnnnnnnnnnnnnnnnnnnnnnnnnnnnnnnnnnnnnnnnnnnnnnnnnnnnnnnnnnnnnnnnnnnnnnnnnnnnnnnnnnnnnnnnnnnnnnnnnnnnnnnnnnnnnnnnnnnnnnnnnnnnnnnnnnnnnnnnnnnnnnnnnnnnnnnnnnnnnnnnnnnnnnnnnnnnnnnnnnnnnnnnnnnnnnnnnnnnnnnnnnnnnnnnnnnnnnnnnnnnnnnnnnnnnnnnnnnnnnnnnnnnnnnnnnnnnnnnnnnnnnnnnnnnnnnnnnnnnnnnnnnnnnnnnnnnnnnnnnnnnnnnnnnnnnnnnnnnnnnnnnnnnnnnnnnnnnnnnnnnnnnnnnnnnnnnnnnnnnnnnnnnnnnnnnnnnnnnnnnnnnnnnnnnnnnnnnnnnnnnnnnnnnnnnnnnnnnnnnnnnnnnnnnnnnnnnnnnnnnnnnnnnnnnnnnnnnnnnnnnnnnnnnnnnnnnnnnnnnnnnnnnnnnnnnnnnnnnnnnnnnnnnnnnnnnnnnnnnnnnnnnnnnnnnnnnnnnnnnnnnnnnnnnnnnnnnnnnnnnnnnnnnnnnnnnnnnnnnnnnnnnnnnnnnnnnnnnnnnnnnnnnnnnnnnnnnnnnnnnnnnnnnnnnnnnnnnnnnnnnnnnnnnnnnnnnnnnnnnnnnnnnnnnnnnnnnnnnnnnnnnnnnnnnnnnnnnnnnnnnnnnnnnnnnnnnnnnnnnnnnnnnnnnnnnnnnnnnnnnnnnnnnnnnnnnnnnnnnnnnnnnnnnnnnnnnnnnnnnnnnnnnnnnnnnnnnnnnnnnnnnnnnnnnnnnnnnnnnnnnnnnnnnnnnnnnnnnnnnnnnnnnnnnnnnnnnnnnnnnnnnnnnnnnnnnnnnnnnnnnnnnnnnnnnnnnnnnnnnnnnnnnnnnnnnnnnnnnnnnnnnnnnnnnnnnnnnnnnnnnnnnnnnnnnnnnnnnnnnnnnnnnnnnnnnnnnnnnnnnnnnnnnnnnnnnnnnnnnnnnnnnnnnnnnnnnnnnnnnnnnnnnnnnnnnnnnnnnnnnnnnnnnnnnnnnnnnnnnnnnnnnnnnnnnnnnnnnnnnnnnnnnnnnnnnnnnnnnnnnnnnnnnnnnnnnnnnnnnnnnnnnnnnnnnnnnnnnnnnnnnnnnnnnnnnnnnnnnnnnnnnnnnnnnnnnnnnnnnnnnnnnnnnnnnnnnnnnnnnnnnnnnnnnnnnnnnnnnnnnnnnnnnnnnnnnnnnnnnnnnnnnnnnnnnnnnnnnnnnnnnnnnnnnnnnnnnnnnnnnnnnnnnnnnnnnnnnnnnnnnnnnnnnnnnnnnnnnnnnnnnnnnnnnnnnnnnnnnnnnnnnnnnnnnnnnnnnnnnnnnnnnnnnnnnnnnnnnnnnnnnnnnnnnnnnnnnnnnnnnnnnnnnnnnnnnnnnnnnnnnnnnnnnnnnnnnnnnnnnnnnnnnnnnnnnnnnnnnnnnnnnnnnnnnnnnnnnnnnnnnnnnnnnnnnnnnnnnnnnnnnnnnnnnnnnnnnnnnnnnnnnnnnnnnnnnnnnnnnnnnnnnnnnnnnnnnnnnnnnnnnnnnnnnnnnnnnnnnnnnnnnnnnnnnnnnnnnnnnnnnnnnnnnnnnnnnnnnnnnnnnnnnnnnnnnnnnnnnnnnnnnnnnnnnnnnnnnnnnnnnnnnnnnnnnnnnnnnnnnnnnnnnnnnnnnnnnnnnnnnnnnnnnnnnnnnnnnnnnnnnnnnnnnnnnnnnnnnnnnnnnnnnnnnnnnnnnnnnnnnnnnnnnnnnnnnnnnnnnnnnnnnnnnnnnnnnnnnnnnnnnnnnnnnnnnnnnnnnnnnnnnnnnnnnnnnnnnnnnnnnnnnnnnnnnnnnnnnnnnnnnnnnnnnnnnnnnnnnnnnnnnnnnnnnnnnnnnnnnnnnnnnnnnnnnnnnnnnnnnnnnnnnnnnnnnnnnnnnnnnnnnnnnnnnnnnnnnnnnnnnnnnnnnnnnnnnnnnnnnnnnnnnnnnnnnnnnnnnnnnnnnnnnnnnnnnnnnnnnnnnnnnnnnnnnnnnnnnnnnnnnnnnnnnnnnnnnnnnnnnnnnnnnnnnnnnnnnnnnnnnnnnnnnnnnnnnnnnnnnnnnnnnnnnnnnnnnnnnnnnnnnnnnnnnnnnnnnnnnnnnnnnnnnnnnnnnnnnnnnnnnnnnnnnnnnnnnnnnnnnnnnnnnnnnnnnnnnnnnnnnnnnnnnnnnnnnnnnnnnnnnnnnnnnnnnnnnnnnnnnnnnnnnnnnnnnnnnnnnnnnnnnnnnnnnnnnnnnnnnnnnnnnnnnnnnnnnnnnnnnnnnnnnnnnnnnnnnnnnnnnnnnnnnnnnnnnnnnnnnnnnnnnnnnnnnnnnnnnnnnnnnnnnnnnnnnnnnnnnnnnnnnnnnnnnnnnnnnnnnnnnnnnnnnnnnnnnnnnnnnnnnnnnnnnnnnnnnnnnnnnnnnnnnnnnnnnnnnnnnnnnnnnnnnnnnnnnnnnnnnnnnnnnnnnnnnnnnnnnnnnnnnnnnnnnnnnnnnnnnnnnnnnnnnnnnnnnnnnnnnnnnnnnnnnnnnnnnnnnnnnnnnnnnnnnnnnnnnnnnnnnnnnnnnnnnnnnnnnnnnnnnnnnnnnnnnnnnnnnnnnnnnnnnnnnnnnnnnnnnnnnnnnnnnnnnnnnnnnnnnnnnnnnnnnnnnnnnnnnnnnnnnnnnnnnnnnnnnnnnnnnnnnnnnnnnnnnnnnnnnnnnnnnnnnnnnnnnnnnnnnnnnnnnnnnnnnnnnnnnnnnnnnnnnnnnnnnnnnnnnnnnnnnnnnnnnnnnnnnnnnnnnnnnnnnnnnnnnnnnnnnnnnnnnnnnnnnnnnnnnnnnnnnnnnnnnnnnnnnnnnnnnnnnnnnnnnnnnnnnnnnnnnnnnnnnnnnnnnnnnnnnnnnnnnnnnnnnnnnnnnnnnnnnnnnnnnnnnnnnnnnnnnnnnnnnnnnnnnnnnnnnnnnnnnnnnnnnnnnnnnnnnnnnnnnnnnnnnnnnnnnnnnnnnnnnnnnnnnnnnnnnnnnnnnnnnnnnnnnnnnnnnnnnnnnnnnnnnnnnnnnnnnnnnnnnnnnnnnnnnnnnnnnnnnnnnnnnnnnnnnnnnnnnnnnnnnnnnnnnnnnnnnnnnnnnnnnnnnnnnnnnnnnnnnnnnnnnnnnnnnnnnnnnnnnnnnnnnnnnnnnnnnnnnnnnnnnnnnnnnnnnnnnnnnnnnnnnnnnnnnnnnnnnnnnnnnnnnnnnnnnnnnnnnnnnnnnnnnnnnnnnnnnnnnnnnnnnnnnnnnnnnnnnnnnnnnnnnnnnnnnnnnnnnnnnnnnnnnnnnnnnnnnnnnnnnnnnnnnnnnnnnnnnnnnnnnnnnnnnnnnnnnnnnnnnnnnnnnnnnnnnnnnnnnnnnnnnnnnnnnnnnnnnnnnnnnnnnnnnnnnnnnnnnnnnnnnnnnnnnnnnnnnnnnnnnnnnnnnnnnnnnnnnnnnnnnnnnnnnnnnnnnnnnnnnnnnnnnnnnnnnnnnnnnnnnnnnnnnnnnnnnnnnnnnnnnnnnnnnnnnnnnnnnnnnnnnnnnnnnnnnnnnnnnnnnnnnnnnnnnnnnnnnnnnnnnnnnnnnnnnnnnnnnnnnnnnnnnnnnnnnnnnnnnnnnnnnnnnnnnnnnnnnnnnnnnnnnnnnnnnnnnnnnnnnnnnnnnnnnnnnnnnnnnnnnnnnnnnnnnnnnnnnnnnnnnnnnnnnnnnnnnnnnnnnnnnnnnnnnnnnnnnnnnnnnnnnnnnnnnnnnnnnnnnnnnnnnnnnnnnnnnnnnnnnnnnnnnnnnnnnnnnnnnnnnnnnnnnnnnnnnnnnnnnnnnnnnnnnnnnnnnnnnnnnnnnnnnnnnnnnnnnnnnnnnnnnnnnnnnnnnnnnnnnnnnnnnnnnnnnnnnnnnnnnnnnnnnnnnnnnnnnnnnnnnnnnnnnnnnnnnnnnnnnnnnnnnnnnnnnnnnnnnnnnnnnnnnnnnnnnnnnnnnnnnnnnnnnnnnnnnnnnnnnnnnnnnnnnnnnnnnnnnnnnnnnnnnnnnnnnnnnnnnnnnnnnnnnnnnnnnnnnnnnnnnnnnnnnnnnnnnnnnnnnnnnnnnnnnnnnnnnnnnnnnnnnnnnnnnnnnnnnnnnnnnnnnnnnnnnnnnnnnnnnnnnnnnnnnnnnnnnnnnnnnnnnnnnnnnnnnnnnnnnnnnnnnnnnnnnnnnnnnnnnnnnnnnnnnnnnnnnnnnnnnnnnnnnnnnnnnnnnnnnnnnnnnnnnnnnnnnnnnnnnnnnnnnnnnnnnnnnnnnnnnnnnnnnnnnnnnnnnnnnnnnnnnnnnnnnnnnnnnnnnnnnnnnnnnnnnnnnnnnnnnnnnnnnnnnnnnnnnnnnnnnnnnnnnnnnnnnnnnnnnnnnnnnnnnnnnnnnnnnnnnnnnnnnnnnnnnnnnnnnnnnnnnnnnnnnnnnnnnnnnnnnnnnnnnnnnnnnnnnnnnnnnnnnnnnnnnnnnnnnnnnnnnnnnnnnnnnnnnnnnnnnnnnnnnnnnnnnnnnnnnnnnnnnnnnnnnnnnnnnnnnnnnnnnnnnnnnnnnnnnnnnnnnnnnnnnnnnnnnnnnnnnnnnnnnnnnnnnnnnnnnnnnnnnnnnnnnnnnnnnnnnnnnnnnnnnnnnnnnnnnnnnnnnnnnnnnnnnnnnnnnnnnnnnnnnnnnnnnnnnnnnnnnnnnnnnnnnnnnnnnnnnnnnnnnnnnnnnnnnnnnnnnnnnnnnnnnnnnnnnnnnnnnnnnnnnnnnnnnnnnnnnnnnnnnnnnnnnnnnnnnnnnnnnnnnnnnnnnnnnnnnnnnnnnnnnnnnnnnnnnnnnnnnnnnnnnnnnnnnnnnnnnnnnnnnnnnnnnnnnnnnnnnnnnnnnnnnnnnnnnnnnnnnnnnnnnnnnnnnnnnnnnnnnnnnnnnnnnnnnnnnnnnnnnnnnnnnnnnnnnnnnnnnnnnnnnnnnnnnnnnnnnnnnnnnnnnnnnnnnnnnnnnnnnnnnnnnnnnnnnnnnnnnnnnnnnnnnnnnnnnnnnnnnnnnnnnnnnnnnnnnnnnnnnnnnnnnnnnnnnnnnnnnnnnnnnnnnnnnnnnnnnnnnnnnnnnnnnnnnnnnnnnnnnnnnnnnnnnnnnnnnnnnnnnnnnnnnnnnnnnnnnnnnnnnnnnnnnnnnnnnnnnnnnnnnnnnnnnnnnnnnnnnnnnnnnnnnnnnnnnnnnnnnnnnnnnnnnnnnnnnnnnnnnnnnnnnnnnnnnnnnnnnnnnnnnnnnnnnnnnnnnnnnnnnnnnnnnnnnnnnnnnnnnnnnnnnnnnnnnnnnnnnnnnnnnnnnnnnnnnnnnnnnnnnnnnnnnnnnnnnnnnnnnnnnnnnnnnnnnnnnnnnnnnnnnnnnnnnnnnnnnnnnnnnnnnnnnnnnnnnnnnnnnnnnnnnnnnnnnnnnnnnnnnnnnnnnnnnnnnnnnnnnnnnnnnnnnnnnnnnnnnnnnnnnnnnnnnnnnnnnnnnnnnnnnnnnnnnnnnnnnnnnnnnnnnnnnnnnnnnnnnnnnnnnnnnnnnnnnnnnnnnnnnnnnnnnnnnnnnnnnnnnnnnnnnnnnnnnnnnnnnnnnnnnnnnnnnnnnnnnnnnnnnnnnnnnnnnnnnnnnnnnnnnnnnnnnnnnnnnnnnnnnnnnnnnnnnnnnnnnnnnnnnnnnnnnnnnnnnnnnnnnnnnnnnnnnnnnnnnnnnnnnnnnnnnnnnnnnnnnnnnnnnnnnnnnnnnnnnnnnnnnnnnnnnnnnnnnnnnnnnnnnnnnnnnnnnnnnnnnnnnnnnnnnnnnnnnnnnnnnnnnnnnnnnnnnnnnnnnnnnnnnnnnnnnnnnnnnnnnnnnnnnnnnnnnnnnnnnnnnnnnnnnnnnnnnnnnnnnnnnnnnnnnnnnnnnnnnnnnnnnnnnnnnnnnnnnnnnnnnnnnnnnnnnnnnnnnnnnnnnnnnnnnnnnnnnnnnnnnnnnnnnnnnnnnnnnnnnnnnnnnnnnnnnnnnnnnnnnnnnnnnnnnnnnnnnnnnnnnnnnnnnnnnnnnnnnnnnnnnnnnnnnnnnnnnnnnnnnnnnnnnnnnnnnnnnnnnnnnnnnnnnnnnnnnnnnnnnnnnnnnnnnnnnnnnnnnnnnnnnnnnnnnnnnnnnnnnnnnnnnnnnnnnnnnnnnnnnnnnnnnnnnnnnnnnnnnnnnnnnnnnnnnnnnnnnnnnnnnnnnnnnnnnnnnnnnnnnnnnnnnnnnnnnnnnnnnnnnnnnnnnnnnnnnnnnnnnnnnnnnnnnnnnnnnnnnnnnnnnnnnnnnnnnnnnnnnnnnnnnnnnnnnnnnnnnnnnnnnnnnnnnnnnnnnnnnnnnnnnnnnnnnnnnnnnnnnnnnnnnnnnnnnnnnnnnnnnnnnnnnnnnnnnnnnnnnnnnnnnnnnnnnnnnnnnnnnnnnnnnnnnnnnnnnnnnnnnnnnnnnnnnnnnnnnnnnnnnnnnnnnnnnnnnnnnnnnnnnnnnnnnnnnnnnnnnnnnnnnnnnnnnnnnnnnnnnnnnnnnnnnnnnnnnnnnnnnnnnnnnnnnnnnnnnnnnnnnnnnnnnnnnnnnnnnnnnnnnnnnnnnnnnnnnnnnnnnnnnnnnnnnnnnnnnnnnnnnnnnnnnnnnnnnnnnnnnnnnnnnnnnnnnnnnnnnnnnnnnnnnnnnnnnnnnnnnnnnnnnnnnnnnnnnnnnnnnnnnnnnnnnnnnnnnnnnnnnnnnnnnnnnnnnnnnnnnnnnnnnnnnnnnnnnnnnnnnnnnnnnnnnnnnnnnnnnnnnnnnnnnnnnnnnnnnnnnnnnnnnnnnnnnnnnnnnnnnnnnnnnnnnnnnnnnnnnnnnnnnnnnnnnnnnnnnnnnnnnnnnnnnnnnnnnnnnnnnnnnnnnnnnnnnnnnnnnnnnnnnnnnnnnnnnnnnnnnnnnnnnnnnnnnnnnnnnnnnnnnnnnnnnnnnnnnnnnnnnnnnnnnnnnnnnnnnnnnnnnnnnnnnnnnnnnnnnnnnnnnnnnnnnnnnnnnnnnnnnnnnnnnnnnnnnnnnnnnnnnnnnnnnnnnnnnnnnnnnnnnnnnnnnnnnnnnnnnnnnnnnnnnnnnnnnnnnnnnnnnnnnnnnnnnnnnnnnnnnnnnnnnnnnnnnnnnnnnnnnnnnnnnnnnnnnnnnnnnnnnnnnnnnnnnnnnnnnnnnnnnnnnnnnnnnnnnnnnnnnnnnnnnnnnnnnnnnnnnnnnnnnnnnnnnnnnnnnnnnnnnnnnnnnnnnnnnnnnnnnnnnnnnnnnnnnnnnnnnnnnnnnnnnnnnnnnnnnnnnnnnnnnnnnnnnnnnnnnnnnnnnnnnnnnnnnnnnnnnnnnnnnnnnnnnnnnnnnnnnnnnnnnnnnnnnnnnnnnnnnnnnnnnnnnnnnnnnnnnnnnnnnnnnnnnnnnnnnnnnnnnnnnnnnnnnnnnnnnnnnnnnnnnnnnnnnnnnnnnnnnnnnnnnnnnnnnnnnnnnnnnnnnnnnnnnnnnnnnnnnnnnnnnnnnnnnnnnnnnnnnnnnnnnnnnnnnnnnnnnnnnnnnnnnnnnnnnnnnnnnnnnnnnnnnnnnnnnnnnnnnnnnnnnnnnnnnnnnnnnnnnnnnnnnnnnnnnnnnnnnnnnnnnnnnnnnnnnnnnnnnnnnnnnnnnnnnnnnnnnnnnnnnnnnnnnnnnnnnnnnnnnnnnnnnnnnnnnnnnnnnnnnnnnnnnnnnnnnnnnnnnnnnnnnnnnnnnnnnnnnnnnnnnnnnnnnnnnnnnnnnnnnnnnnnnnnnnnnnnnnnnnnnnnnnnnnnnnnnnnnnnnnnnnnnnnnnnnnnnnnnnnnnnnnnnnnnnnnnnnnnnnnnnnnnnnnnnnnnnnnnnnnnnnnnnnnnnnnnnnnnnnnnnnnnnnnnnnnnnnnnnnnnnnnnnnnnnnnnnnnnnnnnnnnnnnnnnnnnnnnnnnnnnnnnnnnnnnnnnnnnnnnnnnnnnnnnnnnnnnnnnnnnnnnnnnnnnnnnnnnnnnnnnnnnnnnnnnnnnnnnnnnnnnnnnnnnnnnnnnnnnnnnnnnnnnnnnnnnnnnnnnnnnnnnnnnnnnnnnnnnnnnnnnnnnnnnnnnnnnnnnnnnnnnnnnnnnnnnnnnnnnnnnnnnnnnnnnnnnnnnnnnnnnnnnnnnnnnnnnnnnnnnnnnnnnnnnnnnnnnnnnnnnnnnnnnnnnnnnnnnnnnnnnnnnnnnnnnnnnnnnnnnnnnnnnnnnnnnnnnnnnnnnnnnnnnnnnnnnnnnnnnnnnnnnnnnnnnnnnnnnnnnnnnnnnnnnnnnnnnnnnnnnnnnnnnnnnnnnnnnnnnnnnnnnnnnnnnnnnnnnnnnnnnnnnnnnnnnnnnnnnnnnnnnnnnnnnnnnnnnnnnnnnnnnnnnnnnnnnnnnnnnnnnnnnnnnnnnnnnnnnnnnnnnnnnnnnnnnnnnnnnnnnnnnnnnnnnnnnnnnnnnnnnnnnnnnnnnnnnnnnnnnnnnnnnnnnnnnnnnnnnnnnnnnnnnnnnnnnnnnnnnnnnnnnnnnnnnnnnnnnnnnnnnnnnnnnnnnnnnnnnnnnnnnnnnnnnnnnnnnnnnnnnnnnnnnnnnnnnnnnnnnnnnnnnnnnnnnnnnnnnnnnnnnnnnnnnnnnnnnnnnnnnnnnnnnnnnnnnnnnnnnnnnnnnnnnnnnnnnnnnnnnnnnnnnnnnnnnnnnnnnnnnnnnnnnnnnnnnnnnnnnnnnnnnnnnnnnnnnnnnnnnnnnnnnnnnnnnnnnnnnnnnnnnnnnnnnnnnnnnnnnnnnnnnnnnnnnnnnnnnnnnnnnnnnnnnnnnnnnnnnnnnnnnnnnnnnnnnnnnnnnnnnnnnnnnnnnnnnnnnnnnnnnnnnnnnnnnnnnnnnnnnnnnnnnnnnnnnnnnnnnnnnnnnnnnnnnnnnnnnnnnnnnnnnnnnnnnnnnnnnnnnnnnnnnnnnnnnnnnnnnnnnnnnnnnnnnnnnnnnnnnnnnnnnnnnnnnnnnnnnnnnnnnnnnnnnnnnnnnnnnnnnnnnnnnnnnnnnnnnnnnnnnnnnnnnnnnnnnnnnnnnnnnnnnnnnnnnnnnnnnnnnnnnnnnnnnnnnnnnnnnnnnnnnnnnnnnnnnnnnnnnnnnnnnnnnnnnnnnnnnnnnnnnnnnnnnnnnnnnnnnnnnnnnnnnnnnnnnnnnnnnnnnnnnnnnnnnnnnnnnnnnnnnnnnnnnnnnnnnnnnnnnnnnnnnnnnnnnnnnnnnnnnnnnnnnnnnnnnnnnnnnnnnnnnnnnnnnnnnnnnnnnnnnnnnnnnnnnnnnnnnnnnnnnnnnnnnnnnnnnnnnnnnnnnnnnnnnnnnnnnnnnnnnnnnnnnnnnnnnnnnnnnnnnnnnnnnnnnnnnnnnnnnnnnnnnnnnnnnnnnnnnnnnnnnnnnnnnnnnnnnnnnnnnnnnnnnnnnnnnnnnnnnnnnnnnnnnnnnnnnnnnnnnnnnnnnnnnnnnnnnnnnnnnnnnnnnnnnnnnnnnnnnnnnnnnnnnnnnnnnnnnnnnnnnnnnnnnnnnnnnnnnnnnnnnnnnnnnnnnnnnnnnnnnnnnnnnnnnnnnnnnnnnnnnnnnnnnnnnnnnnnnnnnnnnnnnnnnnnnnnnnnnnnnnnnnnnnnnnnnnnnnnnnnnnnnnnnnnnnnnnnnnnnnnnnnnnnnnnnnnnnnnnnnnnnnnnnnnnnnnnnnnnnnnnnnnnnnnnnnnnnnnnnnnnnnnnnnnnnnnnnnnnnnnnnnnnnnnnnnnnnnnnnnnnnnnnnnnnnnnnnnnnnnnnnnnnnnnnnnnnnnnnnnnnnnnnnnnnnnnnnnnnnnnnnnnnnnnnnnnnnnnnnnnnnnnnnnnnnnnnnnnnnnnnnnnnnnnnnnnnnnnnnnnnnnnnnnnnnnnnnnnnnnnnnnnnnnnnnnnnnnnnnnnnnnnnnnnnnnnnnnnnnnnnnnnnnnnnnnnnnnnnnnnnnnnnnnnnnnnnnnnnnnnnnnnnnnnnnnnnnnnnnnnnnnnnnnnnnnnnnnnnnnnnnnnnnnnnnnnnnnnnnnnnnnnnnnnnnnnnnnnnnnnnnnnnnnnnnnnnnnnnnnnnnnnnnnnnnnnnnnnnnnnnnnnnnnnnnnnnnnnnnnnnnnnnnnnnnnnnnnnnnnnnnnnnnnnnnnnnnnnnnnnnnnnnnnnnnnnnnnnnnnnnnnnnnnnnnnnnnnnnnnnnnnnnnnnnnnnnnnnnnnnnnnnnnnnnnnnnnnnnnnnnnnnnnnnnnnnnnnnnnnnnnnnnnnnnnnnnnnnnnnnnnnnnnnnnnnnnnnnnnnnnnnnnnnnnnnnnnnnnnnnnnnnnnnnnnnnnnnnnnnnnnnnnnnnnnnnnnnnnnnnnnnnnnnnnnnnnnnnnnnnnnnnnnnnnnnnnnnnnnnnnnnnnnnnnnnnnnnnnnnnnnnnnnnnnnnnnnnnnnnnnnnnnnnnnnnnnnnnnnnnnnnnnnnnnnnnnnnnnnnnnnnnnnnnnnnnnnnnnnnnnnnnnnnnnnnnnnnnnnnnnnnnnnnnnnnnnnnnnnnnnnnnnnnnnnnnnnnnnnnnnnnnnnnnnnnnnnnnnnnnnnnnnnnnnnnnnnnnnnnnnnnnnnnnnnnnnnnnnnnnnnnnnnnnnnnnnnnnnnnnnnnnnnnnnnnnnnnnnnnnnnnnnnnnnnnnnnnnnnnnnnnnnnnnnnnnnnnnnnnnnnnnnnnnnnnnnnnnnnnnnnnnnnnnnnnnnnnnnnnnnnnnnnnnnnnnnnnnnnnnnnnnnnnnnnnnnnnnnnnnnnnnnnnnnnnnnnnnnnnnnnnnnnnnnnnnnnnnnnnnnnnnnnnnnnnnnnnnnnnnnnnnnnnnnnnnnnnnnnnnnnnnnnnnnnnnnnnnnnnnnnnnnnnnnnnnnnnnnnnnnnnnnnnnnnnnnnnnnnnnnnnnnnnnnnnnnnnnnnnnnnnnnnnnnnnnnnnnnnnnnnnnnnnnnnnnnnnnnnnnnnnnnnnnnnnnnnnnnnnnnnnnnnnnnnnnnnnnnnnnnnnnnnnnnnnnnnnnnnnnnnnnnnnnnnnnnnnnnnnnnnnnnnnnnnnnnnnnnnnnnnnnnnnnnnnnnnnnnnnnnnnnnnnnnnnnnnnnnnnnnnnnnnnnnnnnnnnnnnnnnnnnnnnnnnnnnnnnnnnnnnnnnnnnnnnnnnnnnnnnnnnnnnnnnnnnnnnnnnnnnnnnnnnnnnnnnnnnnnnnnnnnnnnnnnnnnnnnnnnnnnnnnnnnnnnnnnnnnnnnnnnnnnnnnnnnnnnnnnnnnnnnnnnnnnnnnnnnnnnnnnnnnnnnnnnnnnnnnnnnnnnnnnnnnnnnnnnnnnnnnnnnnnnnnnnnnnnnnnnnnnnnnnnnnnnnnnnnnnnnnnnnnnnnnnnnnnnnnnnnnnnnnnnnnnnnnnnnnnnnnnnnnnnnnnnnnnnnnnnnnnnnnnnnnnnnnnnnnnnnnnnnnnnnnnnnnnnnnnnnnnnnnnnnnnnnnnnnnnnnnnnnnnnnnnnnnnnnnnnnnnnnnnnnnnnnnnnnnnnnnnnnnnnnnnnnnnnnnnnnnnnnnnnnnnnnnnnnnnnnnnnnnnnnnnnnnnnnnnnnnnnnnnnnnnnnnnnnnnnnnnnnnnnnnnnnnnnnnnnnnnnnnnnnnnnnnnnnnnnnnnnnnnnnnnnnnnnnnnnnnnnnnnnnnnnnnnnnnnnnnnnnnnnnnnnnnnnnnnnnnnnnnnnnnnnnnnnnnnnnnnnnnnnnnnnnnnnnnnnnnnnnnnnnnnnnnnnnnnnnnnnnnnnnnnnnnnnnnnnnnnnnnnnnnnnnnnnnnnnnnnnnnnnnnnnnnnnnnnnnnnnnnnnnnnnnnnnnnnnnnnnnnnnnnnnnnnnnnnnnnnnnnnnnnnnnnnnnnnnnnnnnnnnnnnnnnnnnnnnnnnnnnnnnnnnnnnnnnnnnnnnnnnnnnnnnnnnnnnnnnnnnnnnnnnnnnnnnnnnnnnnnnnnnnnnnnnnnnnnnnnnnnnnnnnnnnnnnnnnnnnnnnnnnnnnnnnnnnnnnnnnnnnnnnnnnnnnnnnnnnnnnnnnnnnnnnnnnnnnnnnnnnnnnnnnnnnnnnnnnnnnnnnnnnnnnnnnnnnnnnnnnnnnnnnnnnnnnnnnnnnnnnnnnnnnnnnnnnnnnnnnnnnnnnnnnnnnnnnnnnnnnnnnnnnnnnnnnnnnnnnnnnnnnnnnnnnnnnnnnnnnnnnnnnnnnnnnnnnnnnnnnnnnnnnnnnnnnnnnnnnnnnnnnnnnnnnnnnnnnnnnnnnnnnnnnnnnnnnnnnnnnnnnnnnnnnnnnnnnnnnnnnnnnnnnnnnnnnnnnnnnnnnnnnnnnnnnnnnnnnnnnnnnnnnnnnnnnnnnnnnnnnnnnnnnnnnnnnnnnnnnnnnnnnnnnnnnnnnnnnnnnnnnnnnnnnnnnnnnnnnnnnnnnnnnnnnnnnnnnnnnnnnnnnnnnnnnnnnnnnnnnnnnnnnnnnnnnnnnnnnnnnnnnnnnnnnnnnnnnnnnnnnnnnnnnnnnnnnnnnnnnnnnnnnnnnnnnnnnnnnnnnnnnnnnnnnnnnnnnnnnnnnnnnnnnnnnnnnnnnnnnnnnnnnnnnnnnnnnnnnnnnnnnnnnnnnnnnnnnnnnnnnnnnnnnnnnnnnnnnnnnnnnnnnnnnnnnnnnnnnnnnnnnnnnnnnnnnnnnnnnnnnnnnnnnnnnnnnnnnnnnnnnnnnnnnnnnnnnnnnnnnnnnnnnnnnnnnnnnnnnnnnnnnnnnnnnnnnnnnnnnnnnnnnnnnnnnnnnnnnnnnnnnnnnnnnnnnnnnnnnnnnnnnnnnnnnnnnnnnnnnnnnnnnnnnnnnnnnnnnnnnnnnnnnnnnnnnnnnnnnnnnnnnnnnnnnnnnnnnnnnnnnnnnnnnnnnnnnnnnnnnnnnnnnnnnnnnnnnnnnnnnnnnnnnnnnnnnnnnnnnnnnnnnnnnnnnnnnnnnnnnnnnnnnnnnnnnnnnnnnnnnnnnnnnnnnnnnnnnnnnnnnnnnnnnnnnnnnnnnnnnnnnnnnnnnnnnnnnnnnnnnnnnnnnnnnnnnnnnnnnnnnnnnnnnnnnnnnnnnnnnnnnnnnnnnnnnnnnnnnnnnnnnnnnnnnnnnnnnnnnnnnnnnnnnnnnnnnnnnnnnnnnnnnnnnnnnnnnnnnnnnnnnnnnnnnnnnnnnnnnnnnnnnnnnnnnnnnnnnnnnnnnnnnnnnnnnnnnnnnnnnnnnnnnnnnnnnnnnnnnnnnnnnnnnnnnnnnnnnnnnnnnnnnnnnnnnnnnnnnnnnnnnnnnnnnnnnnnnnnnnnnnnnnnnnnnnnnnnnnnnnnnnnnnnnnnnnnnnnnnnnnnnnnnnnnnnnnnnnnnnnnnnnnnnnnnnnnnnnnnnnnnnnnnnnnnnnnnnnnnnnnnnnnnnnnnnnnnnnnnnnnnnnnnnnnnnnnnnnnnnnnnnnnnnnnnnnnnnnnnnnnnnnnnnnnnnnnnnnnnnnnnnnnnnnnnnnnnnnnnnnnnnnnnnnnnnnnnnnnnnnnnnnnnnnnnnnnnnnnnnnnnnnnnnnnnnnnnnnnnnnnnnnnnnnnnnnnnnnnnnnnnnnnnnnnnnnnnnnnnnnnnnnnnnnnnnnnnnnnnnnnnnnnnnnnnnnnnnnnnnnnnnnnnnnnnnnnnnnnnnnnnnnnnnnnnnnnnnnnnnnnnnnnnnnnnnnnnnnnnnnnnnnnnnnnnnnnnnnnnnnnnnnnnnnnnnnnnnnnnnnnnnnnnnnnnnnnnnnnnnnnnnnnnnnnnnnnnnnnnnnnnnnnnnnnnnnnnnnnnnnnnnnnnnnnnnnnnnnnnnnnnnnnnnnnnnnnnnnnnnnnnnnnnnnnnnnnnnnnnnnnnnnnnnnnnnnnnnnnnnnnnnnnnnnnnnnnnnnnnnnnnnnnnnnnnnnnnnnnnnnnnnnnnnnnnnnnnnnnnnnnnnnnnnnnnnnnnnnnnnnnnnnnnnnnnnnnnnnnnnnnnnnnnnnnnnnnnnnnnnnnnnnnnnnnnnnnnnnnnnnnnnnnnnnnnnnnnnnnnnnnnnnnnnnnnnnnnnnnnnnnnnnnnnnnnnnnnnnnnnnnnnnnnnnnnnnnnnnnnnnnnnnnnnnnnnnnnnnnnnnnnnnnnnnnnnnnnnnnnnnnnnnnnnnnnnnnnnnnnnnnnnnnnnnnnnnnnnnnnnnnnnnnnnnnnnnnnnnnnnnnnnnnnnnnnnnnnnnnnnnnnnnnnnnnnnnnnnnnnnnnnnnnnnnnnnnnnnnnnnnnnnnnnnnnnnnnnnnnnnnnnnnnnnnnnnnnnnnnnnnnnnnnnnnnnnnnnnnnnnnnnnnnnnnnnnnnnnnnnnnnnnnnnnnnnnnnnnnnnnnnnnnnnnnnnnnnnnnnnnnnnnnnnnnnnnnnnnnnnnnnnnnnnnnnnnnnnnnnnnnnnnnnnnnnnnnnnnnnnnnnnnnnnnnnnnnnnnnnnnnnnnnnnnnnnnnnnnnnnnnnnnnnnnnnnnnnnnnnnnnnnnnnnnnnnnnnnnnnnnnnnnnnnnnnnnnnnnnnnnnnnnnnnnnnnnnnnnnnnnnnnnnnnnnnnnnnnnnnnnnnnnnnnnnnnnnnnnnnnnnnnnnnnnnnnnnnnnnnnnnnnnnnnnnnnnnnnnnnnnnnnnnnnnnnnnnnnnnnnnnnnnnnnnnnnnnnnnnnnnnnnnnnnnnnnnnnnnnnnnnnnnnnnnnnnnnnnnnnnnnnnnnnnnnnnnnnnnnnnnnnnnnnnnnnnnnnnnnnnnnnnnnnnnnnnnnnnnnnnnnnnnnnnnnnnnnnnnnnnnnnnnnnnnnnnnnnnnnnnnnnnnnnnnnnnnnnnnnnnnnnnnnnnnnnnnnnnnnnnnnnnnnnnnnnnnnnnnnnnnnnnnnnnnnnnnnnnnnnnnnnnnnnnnnnnnnnnnnnnnnnnnnnnnnnnnnnnnnnnnnnnnnnnnnnnnnnnnnnnnnnnnnnnnnnnnnnnnnnnnnnnnnnnnnnnnnnnnnnnnnnnnnnnnnnnnnnnnnnnnnnnnnnnnnnnnnnnnnnnnnnnnnnnnnnnnnnnnnnnnnnnnnnnnnnnnnnnnnnnnnnnnnnnnnnnnnnnnnnnnnnnnnnnnnnnnnnnnnnnnnnnnnnnnnnnnnnnnnnnnnnnnnnnnnnnnnnnnnnnnnnnnnnnnnnnnnnnnnnnnnnnnnnnnnnnnnnnnnnnnnnnnnnnnnnnnnnnnnnnnnnnnnnnnnnnnnnnnnnnnnnnnnnnnnnnnnnnnnnnnnnnnnnnnnnnnnnnnnnnnnnnnnnnnnnnnnnnnnnnnnnnnnnnnnnnnnnnnnnnnnnnnnnnnnnnnnnnnnnnnnnnnnnnnnnnnnnnnnnnnnnnnnnnnnnnnnnnnnnnnnnnnnnnnnnnnnnnnnnnnnnnnnnnnnnnnnnnnnnnnnnnnnnnnnnnnnnnnnnnnnnnnnnnnnnnnnnnnnnnnnnnnnnnnnnnnnnnnnnnnnnnnnnnnnnnnnnnnnnnnnnnnnnnnnnnnnnnnnnnnnnnnnnnnnnnnnnnnnnnnnnnnnnnnnnnnnnnnnnnnnnnnnnnnnnnnnnnnnnnnnnnnnnnnnnnnnnnnnnnnnnnnnnnnnnnnnnnnnnnnnnnnnnnnnnnnnnnnnnnnnnnnnnnnnnnnnnnnnnnnnnnnnnnnnnnnnnnnnnnnnnnnnnnnnnnnnnnnnnnnnnnnnnnnnnnnnnnnnnnnnnnnnnnnnnnnnnnnnnnnnnnnnnnnnnnnnnnnnnnnnnnnnnnnnnnnnnnnnnnnnnnnnnnnnnnnnnnnnnnnnnnnnnnnnnnnnnnnnnnnnnnnnnnnnnnnnnnnnnnnnnnnnnnnnnnnnnnnnnnnnnnnnnnnnnnnnnnnnnnnnnnnnnnnnnnnnnnnnnnnnnnnnnnnnnnnnnnnnnnnnnnnnnnnnnnnnnnnnnnnnnnnnnnnnnnnnnnnnnnnnnnnnnnnnnnnnnnnnnnnnnnnnnnnnnnnnnnnnnnnnnnnnnnnnnnnnnnnnnnnnnnnnnnnnnnnnnnnnnnnnnnnnnnnnnnnnnnnnnnnnnnnnnnnnnnnnnnnnnnnnnnnnnnnnnnnnnnnnnnnnnnnnnnnnnnnnnnnnnnnnnnnnnnnnnnnnnnnnnnnnnnnnnnnnnnnnnnnnnnnnnnnnnnnnnnnnnnnnnnnnnnnnnnnnnnnnnnnnnnnnnnnnnnnnnnnnnnnnnnnnnnnnnnnnnnnnnnnnnnnnnnnnnnnnnnnnnnnnnnnnnnnnnnnnnnnnnnnnnnnnnnnnnnnnnnnnnnnnnnnnnnnnnnnnnnnnnnnnnnnnnnnnnnnnnnnnnnnnnnnnnnnnnnnnnnnnnnnnnnnnnnnnnnnnnnnnnnnnnnnnnnnnnnnnnnnnnnnnnnnnnnnnnnnnnnnnnnnnnnnnnnnnnnnnnnnnnnnnnnnnnnnnnnnnnnnnnnnnnnnnnnnnnnnnnnnnnnnnnnnnnnnnnnnnnnnnnnnnnnnnnnnnnnnnnnnnnnnnnnnnnnnnnnnnnnnnnnnnnnnnnnnnnnnnnnnnnnnnnnnnnnnnnnnnnnnnnnnnnnnnnnnnnnnnnnnnnnnnnnnnnnnnnnnnnnnnnnnnnnnnnnnnnnnnnnnnnnnnnnnnnnnnnnnnnnnnnnnnnnnnnnnnnnnnnnnnnnnnnnnnnnnnnnnnnnnnnnnnnnnnnnnnnnnnnnnnnnnnnnnnnnnnnnnnnnnnnnnnnnnnnnnnnnnnnnnnnnnnnnnnnnnnnnnnnnnnnnnnnnnnnnnnnnnnnnnnnnnnnnnnnnnnnnnnnnnnnnnnnnnnnnnnnnnnnnnnnnnnnnnnnnnnnnnnnnnnnnnnnnnnnnnnnnnnnnnnnnnnnnnnnnnnnnnnnnnnnnnnnnnnnnnnnnnnnnnnnnnnnnnnnnnnnnnnnnnnnnnnnnnnnnnnnnnnnnnnnnnnnnnnnnnnnnnnnnnnnnnnnnnnnnnnnnnnnnnnnnnnnnnnnnnnnnnnnnnnnnnnnnnnnnnnnnnnnnnnnnnnnnnnnnnnnnnnnnnnnnnnnnnnnnnnnnnnnnnnnnnnnnnnnnnnnnnnnnnnnnnnnnnnnnnnnnnnnnnnnnnnnnnnnnnnnnnnnnnnnnnnnnnnnnnnnnnnnnnnnnnnnnnnnnnnnnnnnnnnnnnnnnnnnnnnnnnnnnnnnnnnnnnnnnnnnnnnnnnnnnnnnnnnnnnnnnnnnnnnnnnnnnnnnnnnnnnnnnnnnnnnnnnnnnnnnnnnnnnnnnnnnnnnnnnnnnnnnnnnnnnnnnnnnnnnnnnnnnnnnnnnnnnnnnnnnnnnnnnnnnnnnnnnnnnnnnnnnnnnnnnnnnnnnnnnnnnnnnnnnnnnnnnnnnnnnnnnnnnnnnnnnnnnnnnnnnnnnnnnnnnnnnnnnnnnnnnnnnnnnnnnnnnnnnnnnnnnnnnnnnnnnnnnnnnnnnnnnnnnnnnnnnnnnnnnnnnnnnnnnnnnnnnnnnnnnnnnnnnnnnnnnnnnnnnnnnnnnnnnnnnnnnnnnnnnnnnnnnnnnnnnnnnnnnnnnnnnnnnnnnnnnnnnnnnnnnnnnnnnnnnnnnnnnnnnnnnnnnnnnnnnnnnnnnnnnnnnnnnnnnnnnnnnnnnnnnnnnnnnnnnnnnnnnnnnnnnnnnnnnnnnnnnnnnnnnnnnnnnnnnnnnnnnnnnnnnnnnnnnnnnnnnnnnnnnnnnnnnnnnnnnnnnnnnnnnnnnnnnnnnnnnnnnnnnnnnnnnnnnnnnnnnnnnnnnnnnnnnnnnnnnnnnnnnnnnnnnnnnnnnnnnnnnnnnnnnnnnnnnnnnnnnnnnnnnnnnnnnnnnnnnnnnnnnnnnnnnnnnnnnnnnnnnnnnnnnnnnnnnnnnnnnnnnnnnnnnnnnnnnnnnnnnnnnnnnnnnnnnnnnnnnnnnnnnnnnnnnnnnnnnnnnnnnnnnnnnnnnnnnnnnnnnnnnnnnnnnnnnnnnnnnnnnnnnnnnnnnnnnnnnnnnnnnnnnnnnnnnnnnnnnnnnnnnnnnnnnnnnnnnnnnnnnnnnnnnnnnnnnnnnnnnnnnnnnnnnnnnnnnnnnnnnnnnnnnnnnnnnnnnnnnnnnnnnnnnnnnnnnnnnnnnnnnnnnnnnnnnnnnnnnnnnnnnnnnnnnnnnnnnnnnnnnnnnnnnnnnnnnnnnnnnnnnnnnnnnnnnnnnnnnnnnnnnnnnnnnnnnnnnnnnnnnnnnnnnnnnnnnnnnnnnnnnnnnnnnnnnnnnnnnnnnnnnnnnnnnnnnnnnnnnnnnnnnnnnnnnnnnnnnnnnnnnnnnnnnnnnnnnnnnnnnnnnnnnnnnnnnnnnnnnnnnnnnnnnnnnnnnnnnnnnnnnnnnnnnnnnnnnnnnnnnnnnnnnnnnnnnnnnnnnnnnnnnnnnnnnnnnnnnnnnnnnnnnnnnnnnnnnnnnnnnnnnnnnnnnnnnnnnnnnnnnnnnnnnnnnnnnnnnnnnnnnnnnnnnnnnnnnnnnnnnnnnnnnnnnnnnnnnnnnnnnnnnnnnnnnnnnnnnnnnnnnnnnnnnnnnnnnnnnnnnnnnnnnnnnnnnnnnnnnnnnnnnnnnnnnnnnnnnnnnnnnnnnnnnnnnnnnnnnnnnnnnnnnnnnnnnnnnnnnnnnnnnnnnnnnnnnnnnnnnnnnnnnnnnnnnnnnnnnnnnnnnnnnnnnnnnnnnnnnnnnnnnnnnnnnnnnnnnnnnnnnnnnnnnnnnnnnnnnnnnnnnnnnnnnnnnnnnnnnnnnnnnnnnnnnnnnnnnnnnnnnnnnnnnnnnnnnnnnnnnnnnnnnnnnnnnnnnnnnnnnnnnnnnnnnnnnnnnnnnnnnnnnnnnnnnnnnnnnnnnnnnnnnnnnnnnnnnnnnnnnnnnnnnnnnnnnnnnnnnnnnnnnnnnnnnnnnnnnnnnnnnnnnnnnnnnnnnnnnnnnnnnnnnnnnnnnnnnnnnnnnnnnnnnnnnnnnnnnnnnnnnnnnnnnnnnnnnnnnnnnnnnnnnnnnnnnnnnnnnnnnnnnnnnnnnnnnnnnnnnnnnnnnnnnnnnnnnnnnnnnnnnnnnnnnnnnnnnnnnnnnnnnnnnnnnnnnnnnnnnnnnnnnnnnnnnnnnnnnnnnnnnnnnnnnnnnnnnnnnnnnnnnnnnnnnnnnnnnnnnnnnnnnnnnnnnnnnnnnnnnnnnnnnnnnnnnnnnnnnnnnnnnnnnnnnnnnnnnnnnnnnnnnnnnnnnnnnnnnnnnnnnnnnnnnnnnnnnnnnnnnnnnnnnnnnnnnnnnnnnnnnnnnnnnnnnnnnnnnnnnnnnnnnnnnnnnnnnnnnnnnnnnnnnnnnnnnnnnnnnnnnnnnnnnnnnnnnnnnnnnnnnnnnnnnnnnnnnnnnnnnnnnnnnnnnnnnnnnnnnnnnnnnnnnnnnnnnnnnnnnnnnnnnnnnnnnnnnnnnnnnnnnnnnnnnnnnnnnnnnnnnnnnnnnnnnnnnnnnnnnnnnnnnnnnnnnnnnnnnnnnnnnnnnnnnnnnnnnnnnnnnnnnnnnnnnnnnnnnnnnnnnnnnnnnnnnnnnnnnnnnnnnnnnnnnnnnnnnnnnnnnnnnnnnnnnnnnnnnnnnnnnnnnnnnnnnnnnnnnnnnnnnnnnnnnnnnnnnnnnnnnnnnnnnnnnnnnnnnnnnnnnnnnnnnnnnnnnnnnnnnnnnnnnnnnnnnnnnnnnnnnnnnnnnnnnnnnnnnnnnnnnnnnnnnnnnnnnnnnnnnnnnnnnnnnnnnnnnnnnnnnnnnnnnnnnnnnnnnnnnnnnnnnnnnnnnnnnnnnnnnnnnnnnnnnnnnnnnnnnnnnnnnnnnnnnnnnnnnnnnnnnnnnnnnnnnnnnnnnnnnnnnnnnnnnnnnnnnnnnnnnnnnnnnnnnnnnnnnnnnnnnnnnnnnnnnnnnnnnnnnnnnnnnnnnnnnnnnnnnnnnnnnnnnnnnnnnnnnnnnnnnnnnnnnnnnnnnnnnnnnnnnnnnnnnnnnnnnnnnnnnnnnnnnnnnnnnnnnnnnnnnnnnnnnnnnnnnnnnnnnnnnnnnnnnnnnnnnnnnnnnnnnnnnnnnnnnnnnnnnnnnnnnnnnnnnnnnnnnnnnnnnnnnnnnnnnnnnnnnnnnnnnnnnnnnnnnnnnnnnnnnnnnnnnnnnnnnnnnnnnnnnnnnnnnnnnnnnnnnnnnnnnnnnnnnnnnnnnnnnnnnnnnnnnnnnnnnnnnnnnnnnnnnnnnnnnnnnnnnnnnnnnnnnnnnnnnnnnnnnnnnnnnnnnnnnnnnnnnnnnnnnnnnnnnnnnnnnnnnnnnnnnnnnnnnnnnnnnnnnnnnnnnnnnnnnnnnnnnnnnnnnnnnnnnnnnnnnnnnnnnnnnnnnnnnnnnnnnnnnnnnnnnnnnnnnnnnnnnnnnnnnnnnnnnnnnnnnnnnnnnnnnnnnnnnnnnnnnnnnnnnnnnnnnnnnnnnnnnnnnnnnnnnnnnnnnnnnnnnnnnnnnnnnnnnnnnnnnnnnnnnnnnnnnnnnnnnnnnnnnnnnnnnnnnnnnnnnnnnnnnnnnnnnnnnnnnnnnnnnnnnnnnnnnnnnnnnnnnnnnnnnnnnnnnnnnnnnnnnnnnnnnnnnnnnnnnnnnnnnnnnnnnnnnnnnnnnnnnnnnnnnnnnnnnnnnnnnnnnnnnnnnnnnnnnnnnnnnnnnnnnnnnnnnnnnnnnnnnnnnnnnnnnnnnnnnnnnnnnnnnnnnnnnnnnnnnnnnnnnnnnnnnnnnnnnnnnnnnnnnnnnnnnnnnnnnnnnnnnnnnnnnnnnnnnnnnnnnnnnnnnnnnnnnnnnnnnnnnnnnnnnnnnnnnnnnnnnnnnnnnnnnnnnnnnnnnnnnnnnnnnnnnnnnnnnnnnnnnnnnnnnnnnnnnnnnnnnnnnnnnnnnnnnnnnnnnnnnnnnnnnnnnnnnnnnnnnnnnnnnnnnnnnnnnnnnnnnnnnnnnnnnnnnnnnnnnnnnnnnnnnnnnnnnnnnnnnnnnnnnnnnnnnnnnnnnnnnnnnnnnnnnnnnnnnnnnnnnnnnnnnnnnnnnnnnnnnnnnnnnnnnnnnnnnnnnnnnnnnnnnnnnnnnnnnnnnnnnnnnnnnnnnnnnnnnnnnnnnnnnnnnnnnnnnnnnnnnnnnnnnnnnnnnnnnnnnnnnnnnnnnnnnnnnnnnnnnnnnnnnnnnnnnnnnnnnnnnnnnnnnnnnnnnnnnnnnnnnnnnnnnnnnnnnnnnnnnnnnnnnnnnnnnnnnnnnnnnnnnnnnnnnnnnnnnnnnnnnnnnnnnnnnnnnnnnnnnnnnnnnnnnnnnnnnnnnnnnnnnnnnnnnnnnnnnnnnnnnnnnnnnnnnnnnnnnnnnnnnnnnnnnnnnnnnnnnnnnnnnnnnnnnnnnnnnnnnnnnnnnnnnnnnnnnnnnnnnnnnnnnnnnnnnnnnnnnnnnnnnnnnnnnnnnnnnnnnnnnnnnnnnnnnnnnnnnnnnnnnnnnnnnnnnnnnnnnnnnnnnnnnnnnnnnnnnnnnnnnnnnnnnnnnnnnnnnnnnnnnnnnnnnnnnnnnnnnnnnnnnnnnnnnnnnnnnnnnnnnnnnnnnnnnnnnnnnnnnnnnnnnnnnnnnnnnnnnnnnnnnnnnnnnnnnnnnnnnnnnnnnnnnnnnnnnnnnnnnnnnnnnnnnnnnnnnnnnnnnnnnnnnnnnnnnnnnnnnnnnnnnnnnnnnnnnnnnnnnnnnnnnnnnnnnnnnnnnnnnnnnnnnnnnnnnnnnnnnnnnnnnnnnnnnnnnnnnnnnnnnnnnnnnnnnnnnnnnnnnnnnnnnnnnnnnnnnnnnnnnnnnnnnnnnnnnnnnnnnnnnnnnnnnnnnnnnnnnnnnnnnnnnnnnnnnnnnnnnnnnnnnnnnnnnnnnnnnnnnnnnnnnnnnnnnnnnnnnnnnnnnnnnnnnnnnnnnnnnnnnnnnnnnnnnnnnnnnnnnnnnnnnnnnnnnnnnnnnnnnnnnnnnnnnnnnnnnnnnnnnnnnnnnnnnnnnnnnnnnnnnnnnnnnnnnnnnnnnnnnnnnnnnnnnnnnnnnnnnnnnnnnnnnnnnnnnnnnnnnnnnnnnnnnnnnnnnnnnnnnnnnnnnnnnnnnnnnnnnnnnnnnnnnnnnnnnnnnnnnnnnnnnnnnnnnnnnnnnnnnnnnnnnnnnnnnnnnnnnnnnnnnnnnnnnnnnnnnnnnnnnnnnnnnnnnnnnnnnnnnnnnnnnnnnnnnnnnnnnnnnnnnnnnnnnnnnnnnnnnnnnnnnnnnnnnnnnnnnnnnnnnnnnnnnnnnnnnnnnnnnnnnnnnnnnnnnnnnnnnnnnnnnnnnnnnnnnnnnnnnnnnnnnnnnnnnnnnnnnnnnnnnnnnnnnnnnnnnnnnnnnnnnnnnnnnnnnnnnnnnnnnnnnnnnnnnnnnnnnnnnnnnnnnnnnnnnnnnnnnnnnnnnnnnnnnnnnnnnnnnnnnnnnnnnnnnnnnnnnnnnnnnnnnnnnnnnnnnnnnnnnnnnnnnnnnnnnnnnnnnnnnnnnnnnnnnnnnnnnnnnnnnnnnnnnnnnnnnnnnnnnnnnnnnnnnnnnnnnnnnnnnnnnnnnnnnnnnnnnnnnnnnnnnnnnnnnnnnnnnnnnnnnnnnnnnnnnnnnnnnnnnnnnnnnnnnnnnnnnnnnnnnnnnnnnnnnnnnnnnnnnnnnnnnnnnnnnnnnnnnnnnnnnnnnnnnnnnnnnnnnnnnnnnnnnnnnnnnnnnnnnnnnnnnnnnnnnnnnnnnnnnnnnnnnnnnnnnnnnnnnnnnnnnnnnnnnnnnnnnnnnnnnnnnnnnnnnnnnnnnnnnnnnnnnnnnnnnnnnnnnnnnnnnnnnnnnnnnnnnnnnnnnnnnnnnnnnnnnnnnnnnnnnnnnnnnnnnnnnnnnnnnnnnnnnnnnnnnnnnnnnnnnnnnnnnnnnnnnnnnnnnnnnnnnnnnnnnnnnnnnnnnnnnnnnnnnnnnnnnnnnnnnnnnnnnnnnnnnnnnnnnnnnnnnnnnnnnnnnnnnnnnnnnnnnnnnnnnnnnnnnnnnnnnnnnnnnnnnnnnnnnnnnnnnnnnnnnnnnnnnnnnnnnnnnnnnnnnnnnnnnnnnnnnnnnnnnnnnnnnnnnnnnnnnnnnnnnnnnnnnnnnnnnnnnnnnnnnnnnnnnnnnnnnnnnnnnnnnnnnnnnnnnnnnnnnnnnnnnnnnnnnnnnnnnnnnnnnnnnnnnnnnnnnnnnnnnnnnnnnnnnnnnnnnnnnnnnnnnnnnnnnnnnnnnnnnnnnnnnnnnnnnnnnnnnnnnnnnnnnnnnnnnnnnnnnnnnnnnnnnnnnnnnnnnnnnnnnnnnnnnnnnnnnnnnnnnnnnnnnnnnnnnnnnnnnnnnnnnnnnnnnnnnnnnnnnnnnnnnnnnnnnnnnnnnnnnnnnnnnnnnnnnnnnnnnnnnnnnnnnnnnnnnnnnnnnnnnnnnnnnnnnnnnnnnnnnnnnnnnnnnnnnnnnnnnnnnnnnnnnnnnnnnnnnnnnnnnnnnnnnnnnnnnnnnnnnnnnnnnnnnnnnnnnnnnnnnnnnnnnnnnnnnnnnnnnnnnnnnnnnnnnnnnnnnnnnnnnnnnnnnnnnnnnnnnnnnnnnnnnnnnnnnnnnnnnnnnnnnnnnnnnnnnnnnnnnnnnnnnnnnnnnnnnnnnnnnnnnnnnnnnnnnnnnnnnnnnnnnnnnnnnnnnnnnnnnnnnnnnnnnnnnnnnnnnnnnnnnnnnnnnnnnnnnnnnnnnnnnnnnnnnnnnnnnnnnnnnnnnnnnnnnnnnnnnnnnnnnnnnnnnnnnnnnnnnnnnnnnnnnnnnnnnnnnnnnnnnnnnnnnnnnnnnnnnnnnnnnnnnnnnnnnnnnnnnnnnnnnnnnnnnnnnnnnnnnnnnnnnnnnnnnnnnnnnnnnnnnnnnnnnnnnnnnnnnnnnnnnnnnnnnnnnnnnnnnnnnnnnnnnnnnnnnnnnnnnnnnnnnnnnnnnnnnnnnnnnnnnnnnnnnnnnnnnnnnnnnnnnnnnnnnnnnnnnnnnnnnnnnnnnnnnnnnnnnnnnnnnnnnnnnnnnnnnnnnnnnnnnnnnnnnnnnnnnnnnnnnnnnnnnnnnnnnnnnnnnnnnnnnnnnnnnnnnnnnnnnnnnnnnnnnnnnnnnnnnnnnnnnnnnnnnnnnnnnnnnnnnnnnnnnnnnnnnnnnnnnnnnnnnnnnnnnnnnnnnnnnnnnnnnnnnnnnnnnnnnnnnnnnnnnnnnnnnnnnnnnnnnnnnnnnnnnnnnnnnnnnnnnnnnnnnnnnnnnnnnnnnnnnnnnnnnnnnnnnnnnnnnnnnnnnnnnnnnnnnnnnnnnnnnnnnnnnnnnnnnnnnnnnnnnnnnnnnnnnnnnnnnnnnnnnnnnnnnnnnnnnnnnnnnnnnnnnnnnnnnnnnnnnnnnnnnnnnnnnnnnnnnnnnnnnnnnnnnnnnnnnnnnnnnnnnnnnnnnnnnnnnnnnnnnnnnnnnnnnnnnnnnnnnnnnnnnnnnnnnnnnnnnnnnnnnnnnnnnnnnnnnnnnnnnnnnnnnnnnnnnnnnnnnnnnnnnnnnnnnnnnnnnnnnnnnnnnnnnnnnnnnnnnnnnnnnnnnnnnnnnnnnnnnnnnnnnnnnnnnnnnnnnnnnnnnnnnnnnnnnnnnnnnnnnnnnnnnnnnnnnnnnnnnnnnnnnnnnnnnnnnnnnnnnnnnnnnnnnnnnnnnnnnnnnnnnnnnnnnnnnnnnnnnnnnnnnnnnnnnnnnnnnnnnnnnnnnnnnnnnnnnnnnnnnnnnnnnnnnnnnnnnnnnnnnnnnnnnnnnnnnnnnnnnnnnnnnnnnnnnnnnnnnnnnnnnnnnnnnnnnnnnnnnnnnnnnnnnnnnnnnnnnnnnnnnnnnnnnnnnnnnnnnnnnnnnnnnnnnnnnnnnnnnnnnnnnnnnnnnnnnnnnnnnnnnnnnnnnnnnnnnnnnnnnnnnnnnnnnnnnnnnnnnnnnnnnnnnnnnnnnnnnnnnnnnnnnnnnnnnnnnnnnnnnnnnnnnnnnnnnnnnnnnnnnnnnnnnnnnnnnnnnnnnnnnnnnnnnnnnnnnnnnnnnnnnnnnnnnnnnnnnnnnnnnnnnnnnnnnnnnnnnnnnnnnnnnnnnnnnnnnnnnnnnnnnnnnnnnnnnnnnnnnnnnnnnnnnnnnnnnnnnnnnnnnnnnnnnnnnnnnnnnnnnnnnnnnnnnnnnnnnnnnnnnnnnnnnnnnnnnnnnnnnnnnnnnnnnnnnnnnnnnnnnnnnnnnnnnnnnnnnnnnnnnnnnnnnnnnnnnnnnnnnnnnnnnnnnnnnnnnnnnnnnnnnnnnnnnnnnnnnnnnnnnnnnnnnnnnnnnnnnnnnnnnnnnnnnnnnnnnnnnnnnnnnnnnnnnnnnnnnnnnnnnnnnnnnnnnnnnnnnnnnnnnnnnnnnnnnnnnnnnnnnnnnnnnnnnnnnnnnnnnnnnnnnnnnnnnnnnnnnnnnnnnnnnnnnnnnnnnnnnnnnnnnnnnnnnnnnnnnnnnnnnnnnnnnnnnnnnnnnnnnnnnnnnnnnnnnnnnnnnnnnnnnnnnnnnnnnnnnnnnnnnnnnnnnnnnnnnnnnnnnnnnnnnnnnnnnnnnnnnnnnnnnnnnnnnnnnnnnnnnnnnnnnnnnnnnnnnnnnnnnnnnnnnnnnnnnnnnnnnnnnnnnnnnnnnnnnnnnnnnnnnnnnnnnnnnnnnnnnnnnnnnnnnnnnnnnnnnnnnnnnnnnnnnnnnnnnnnnnnnnnnnnnnnnnnnnnnnnnnnnnnnnnnnnnnnnnnnnnnnnnnnnnnnnnnnnnnnnnnnnnnnnnnnnnnnnnnnnnnnnnnnnnnnnnnnnnnnnnnnnnnnnnnnnnnnnnnnnnnnnnnnnnnnnnnnnnnnnnnnnnnnnnnnnnnnnnnnnnnnnnnnnnnnnnnnnnnnnnnnnnnnnnnnnnnnnnnnnnnnnnnnnnnnnnnnnnnnnnnnnnnnnnnnnnnnnnnnnnnnnnnnnnnnnnnnnnnnnnnnnnnnnnnnnnnnnnnnnnnnnnnnnnnnnnnnnnnnnnnnnnnnnnnnnnnnnnnnnnnnnnnnnnnnnnnnnnnnnnnnnnnnnnnnnnnnnnnnnnnnnnnnnnnnnnnnnnnnnnnnnnnnnnnnnnnnnnnnnnnnnnnnnnnnnnnnnnnnnnnnnnnnnnnnnnnnnnnnnnnnnnnnnnnnnnnnnnnnnnnnnnnnnnnnnnnnnnnnnnnnnnnnnnnnnnnnnnnnnnnnnnnnnnnnnnnnnnnnnnnnnnnnnnnnnnnnnnnnnnnnnnnnnnnnnnnnnnnnnnnnnnnnnnnnnnnnnnnnnnnnnnnnnnnnnnnnnnnnnnnnnnnnnnnnnnnnnnnnnnnnnnnnnnnnnnnnnnnnnnnnnnnnnnnnnnnnnnnnnnnnnnnnnnnnnnnnnnnnnnnnnnnnnnnnnnnnnnnnnnnnnnnnnnnnnnnnnnnnnnnnnnnnnnnnnnnnnnnnnnnnnnnnnnnnnnnnnnnnnnnnnnnnnnnnnnnnnnnnnnnnnnnnnnnnnnnnnnnnnnnnnnnnnnnnnnnnnnnnnnnnnnnnnnnnnnnnnnnnnnnnnnnnnnnnnnnnnnnnnnnnnnnnnnnnnnnnnnnnnnnnnnnnnnnnnnnnnnnnnnnnnnnnnnnnnnnnnnnnnnnnnnnnnnnnnnnnnnnnnnnnnnnnnnnnnnnnnnnnnnnnnnnnnnnnnnnnnnnnnnnnnnnnnnnnnnnnnnnnnnnnnnnnnnnnnnnnnnnnnnnnnnnnnnnnnnnnnnnnnnnnnnnnnnnnnnnnnnnnnnnnnnnnnnnnnnnnnnnnnnnnnnnnnnnnnnnnnnnnnnnnnnnnnnnnnnnnnnnnnnnnnnnnnnnnnnnnnnnnnnnnnnnnnnnnnnnnnnnnnnnnnnnnnnnnnnnnnnnnnnnnnnnnnnnnnnnnnnnnnnnnnnnnnnnnnnnnnnnnnnnnnnnnnnnnnnnnnnnnnnnnnnnnnnnnnnnnnnnnnnnnnnnnnnnnnnnnnnnnnnnnnnnnnnnnnnnnnnnnnnnnnnnnnnnnnnnnnnnnnnnnnnnnnnnnnnnnnnnnnnnnnnnnnnnnnnnnnnnnnnnnnnnnnnnnnnnnnnnnnnnnnnnnnnnnnnnnnnnnnnnnnnnnnnnnnnnnnnnnnnnnnnnnnnnnnnnnnnnnnnnnnnnnnnnnnnnnnnnnnnnnnnnnnnnnnnnnnnnnnnnnnnnnnnnnnnnnnnnnnnnnnnnnnnnnnnnnnnnnnnnnnnnnnnnnnnnnnnnnnnnnnnnnnnnnnnnnnnnnnnnnnnnnnnnnnnnnnnnnnnnnnnnnnnnnnnnnnnnnnnnnnnnnnnnnnnnnnnnnnnnnnnnnnnnnnnnnnnnnnnnnnnnnnnnnnnnnnnnnnnnnnnnnnnnnnnnnnnnnnnnnnnnnnnnnnnnnnnnnnnnnnnnnnnnnnnnnnnnnnnnnnnnnnnnnnnnnnnnnnnnnnnnnnnnnnnnnnnnnnnnnnnnnnnnnnnnnnnnnnnnnnnnnnnnnnnnnnnnnnnnnnnnnnnnnnnnnnnnnnnnnnnnnnnnnnnnnnnnnnnnnnnnnnnnnnnnnnnnnnnnnnnnnnnnnnnnnnnnnnnnnnnnnnnnnnnnnnnnnnnnnnnnnnnnnnnnnnnnnnnnnnnnnnnnnnnnnnnnnnnnnnnnnnnnnnnnnnnnnnnnnnnnnnnnnnnnnnnnnnnnnnnnnnnnnnnnnnnnnnnnnnnnnnnnnnnnnnnnnnnnnnnnnnnnnnnnnnnnnnnnnnnnnnnnnnnnnnnnnnnnnnnnnnnnnnnnnnnnnnnnnnnnnnnnnnnnnnnnnnnnnnnnnnnnnnnnnnnnnnnnnnnnnnnnnnnnnnnnnnnnnnnnnnnnnnnnnnnnnnnnnnnnnnnnnnnnnnnnnnnnnnnnnnnnnnnnnnnnnnnnnnnnnnnnnnnnnnnnnnnnnnnnnnnnnnnnnnnnnnnnnnnnnnnnnnnnnnnnnnnnnnnnnnnnnnnnnnnnnnnnnnnnnnnnnnnnnnnnnnnnnnnnnnnnnnnnnnnnnnnnnnnnnnnnnnnnnnnnnnnnnnnnnnnnnnnnnnnnnnnnnnnnnnnnnnnnnnnnnnnnnnnnnnnnnnnnnnnnnnnnnnnnnnnnnnnnnnnnnnnnnnnnnnnnnnnnnnnnnnnnnnnnnnnnnnnnnnnnnnnnnnnnnnnnnnnnnnnnnnnnnnnnnnnnnnnnnnnnnnnnnnnnnnnnnnnnnnnnnnnnnnnnnnnnnnnnnnnnnnnnnnnnnnnnnnnnnnnnnnnnnnnnnnnnnnnnnnnnnnnnnnnnnnnnnnnnnnnnnnnnnnnnnnnnnnnnnnnnnnnnnnnnnnnnnnnnnnnnnnnnnnnnnnnnnnnnnnnnnnnnnnnnnnnnnnnnnnnnnnnnnnnnnnnnnnnnnnnnnnnnnnnnnnnnnnnnnnnnnnnnnnnnnnnnnnnnnnnnnnnnnnnnnnnnnnnnnnnnnnnnnnnnnnnnnnnnnnnnnnnnnnnnnnnnnnnnnnnnnnnnnnnnnnnnnnnnnnnnnnnnnnnnnnnnnnnnnnnnnnnnnnnnnnnnnnnnnnnnnnnnnnnnnnnnnnnnnnnnnnnnnnnnnnnnnnnnnnnnnnnnnnnnnnnnnnnnnnnnnnnnnnnnnnnnnnnnnnnnnnnnnnnnnnnnnnnnnnnnnnnnnnnnnnnnnnnnnnnnnnnnnnnnnnnnnnnnnnnnnnnnnnnnnnnnnnnnnnnnnnnnnnnnnnnnnnnnnnnnnnnnnnnnnnnnnnnnnnnnnnnnnnnnnnnnnnnnnnnnnnnnnnnnnnnnnnnnnnnnnnnnnnnnnnnnnnnnnnnnnnnnnnnnnnnnnnnnnnnnnnnnnnnnnnnnnnnnnnnnnnnnnnnnnnnnnnnnnnnnnnnnnnnnnnnnnnnnnnnnnnnnnnnnnnnnnnnnnnnnnnnnnnnnnnnnnnnnnnnnnnnnnnnnnnnnnnnnnnnnnnnnnnnnnnnnnnnnnnnnnnnnnnnnnnnnnnnnnnnnnnnnnnnnnnnnnnnnnnnnnnnnnnnnnnnnnnnnnnnnnnnnnnnnnnnnnnnnnnnnnnnnnnnnnnnnnnnnnnnnnnnnnnnnnnnnnnnnnnnnnnnnnnnnnnnnnnnnnnnnnnnnnnnnnnnnnnnnnnnnnnnnnnnnnnnnnnnnnnnnnnnnnnnnnnnnnnnnnnnnnnnnnnnnnnnnnnnnnnnnnnnnnnnnnnnnnnnnnnnnnnnnnnnnnnnnnnnnnnnnnnnnnnnnnnnnnnnnnnnnnnnnnnnnnnnnnnnnnnnnnnnnnnnnnnnnnnnnnnnnnnnnnnnnnnnnnnnnnnnnnnnnnnnnnnnnnnnnnnnnnnnnnnnnnnnnnnnnnnnnnnnnnnnnnnnnnnnnnnnnnnnnnnnnnnnnnnnnnnnnnnnnnnnnnnnnnnnnnnnnnnnnnnnnnnnnnnnnnnnnnnnnnnnnnnnnnnnnnnnnnnnnnnnnnnnnnnnnnnnnnnnnnnnnnnnnnnnnnnnnnnnnnnnnnnnnnnnnnnnnnnnnnnnnnnnnnnnnnnnnnnnnnnnnnnnnnnnnnnnnnnnnnnnnnnnnnnnnnnnnnnnnnnnnnnnnnnnnnnnnnnnnnnnnnnnnnnnnnnnnnnnnnnnnnnnnnnnnnnnnnnnnnnnnnnnnnnnnnnnnnnnnnnnnnnnnnnnnnnnnnnnnnnnnnnnnnnnnnnnnnnnnnnnnnnnnnnnnnnnnnnnnnnnnnnnnnnnnnnnnnnnnnnnnnnnnnnnnnnnnnnnnnnnnnnnnnnnnnnnnnnnnnnnnnnnnnnnnnnnnnnnnnnnnnnnnnnnnnnnnnnnnnnnnnnnnnnnnnnnnnnnnnnnnnnnnnnnnnnnnnnnnnnnnnnnnnnnnnnnnnnnnnnnnnnnnnnnnnnnnnnnnnnnnnnnnnnnnnnnnnnnnnnnnnnnnnnnnnnnnnnnnnnnnnnnnnnnnnnnnnnnnnnnnnnnnnnnnnnnnnnnnnnnnnnnnnnnnnnnnnnnnnnnnnnnnnnnnnnnnnnnnnnnnnnnnnnnnnnnnnnnnnnnnnnnnnnnnnnnnnnnnnnnnnnnnnnnnnnnnnnnnnnnnnnnnnnnnnnnnnnnnnnnnnnnnnnnnnnnnnnnnnnnnnnnnnnnnnnnnnnnnnnnnnnnnnnnnnnnnnnnnnnnnnnnnnnnnnnnnnnnnnnnnnnnnnnnnnnnnnnnnnnnnnnnnnnnnnnnnnnnnnnnnnnnnnnnnnnnnnnnnnnnnnnnnnnnnnnnnnnnnnnnnnnnnnnnnnnnnnnnnnnnnnnnnnnnnnnnnnnnnnnnnnnnnnnnnnnnnnnnnnnnnnnnnnnnnnnnnnnnnnnnnnnnnnnnnnnnnnnnnnnnnnnnnnnnnnnnnnnnnnnnnnnnnnnnnnnnnnnnnnnnnnnnnnnnnnnnnnnnnnnnnnnnnnnnnnnnnnnnnnnnnnnnnnnnnnnnnnnnnnnnnnnnnnnnnnnnnnnnnnnnnnnnnnnnnnnnnnnnnnnnnnnnnnnnnnnnnnnnnnnnnnnnnnnnnnnnnnnnnnnnnnnnnnnnnnnnnnnnnnnnnnnnnnnnnnnnnnnnnnnnnnnnnnnnnnnnnnnnnnnnnnnnnnnnnnnnnnnnnnnnnnnnnnnnnnnnnnnnnnnnnnnnnnnnnnnnnnnnnnnnnnnnnnnnnnnnnnnnnnnnnnnnnnnnnnnnnnnnnnnnnnnnnnnnnnnnnnnnnnnnnnnnnnnnnnnnnnnnnnnnnnnnnnnnnnnnnnnnnnnnnnnnnnnnnnnnnnnnnnnnnnnnnnnnnnnnnnnnnnnnnnnnnnnnnnnnnnnnnnnnnnnnnnnnnnnnnnnnnnnnnnnnnnnnnnnnnnnnnnnnnnnnnnnnnnnnnnnnnnnnnnnnnnnnnnnnnnnnnnnnnnnnnnnnnnnnnnnnnnnnnnnnnnnnnnnnnnnnnnnnnnnnnnnnnnnnnnnnnnnnnnnnnnnnnnnnnnnnnnnnnnnnnnnnnnnnnnnnnnnnnnnnnnnnnnnnnnnnnnnnnnnnnnnnnnnnnnnnnnnnnnnnnnnnnnnnnnnnnnnnnnnnnnnnnnnnnnnnnnnnnnnnnnnnnnnnnnnnnnnnnnnnnnnnnnnnnnnnnnnnnnnnnnnnnnnnnnnnnnnnnnnnnnnnnnnnnnnnnnnnnnnnnnnnnnnnnnnnnnnnnnnnnnnnnnnnnnnnnnnnnnnnnnnnnnnnnnnnnnnnnnnnnnnnnnnnnnnnnnnnnnnnnnnnnnnnnnnnnnnnnnnnnnnnnnnnnnnnnnnnnnnnnnnnnnnnnnnnnnnnnnnnnnnnnnnnnnnnnnnnnnnnnnnnnnnnnnnnnnnnnnnnnnnnnnnnnnnnnnnnnnnnnnnnnnnnnnnnnnnnnnnnnnnnnnnnnnnnnnnnnnnnnnnnnnnnnnnnnnnnnnnnnnnnnnnnnnnnnnnnnnnnnnnnnnnnnnnnnnnnnnnnnnnnnnnnnnnnnnnnnnnnnnnnnnnnnnnnnnnnnnnnnnnnnnnnnnnnnnnnnnnnnnnnnnnnnnnnnnnnnnnnnnnnnnnnnnnnnnnnnnnnnnnnnnnnnnnnnnnnnnnnnnnnnnnnnnnnnnnnnnnnnnnnnnnnnnnnnnnnnnnnnnnnnnnnnnnnnnnnnnnnnnnnnnnnnnnnnnnnnnnnnnnnnnnnnnnnnnnnnnnnnnnnnnnnnnnnnnnnnnnnnnnnnnnnnnnnnnnnnnnnnnnnnnnnnnnnnnnnnnnnnnnnnnnnnnnnnnnnnnnnnnnnnnnnnnnnnnnnnnnnnnnnnnnnnnnnnnnnnnnnnnnnnnnnnnnnnnnnnnnnnnnnnnnnnnnnnnnnnnnnnnnnnnnnnnnnnnnnnnnnnnnnnnnnnnnnnnnnnnnnnnnnnnnnnnnnnnnnnnnnnnnnnnnnnnnnnnnnnnnnnnnnnnnnnnnnnnnnnnnnnnnnnnnnnnnnnnnnnnnnnnnnnnnnnnnnnnnnnnnnnnnnnnnnnnnnnnnnnnnnnnnnnnnnnnnnnnnnnnnnnnnnnnnnnnnnnnnnnnnnnnnnnnnnnnnnnnnnnnnnnnnnnnnnnnnnnnnnnnnnnnnnnnnnnnnnnnnnnnnnnnnnnnnnnnnnnnnnnnnnnnnnnnnnnnnnnnnnnnnnnnnnnnnnnnnnnnnnnnnnnnnnnnnnnnnnnnnnnnnnnnnnnnnnnnnnnnnnnnnnnnnnnnnnnnnnnnnnnnnnnnnnnnnnnnnnnnnnnnnnnnnnnnnnnnnnnnnnnnnnnnnnnnnnnnnnnnnnnnnnnnnnnnnnnnnnnnnnnnnnnnnnnnnnnnnnnnnnnnnnnnnnnnnnnnnnnnnnnnnnnnnnnnnnnnnnnnnnnnnnnnnnnnnnnnnnnnnnnnnnnnnnnnnnnnnnnnnnnnnnnnnnnnnnnnnnnnnnnnnnnnnnnnnnnnnnnnnnnnnnnnnnnnnnnnnnnnnnnnnnnnnnnnnnnnnnnnnnnnnnnnnnnnnnnnnnnnnnnnnnnnnnnnnnnnnnnnnnnnnnnnnnnnnnnnnnnnnnnnnnnnnnnnnnnnnnnnnnnnnnnnnnnnnnnnnnnnnnnnnnnnnnnnnnnnnnnnnnnnnnnnnnnnnnnnnnnnnnnnnnnnnnnnnnnnnnnnnnnnnnnnnnnnnnnnnnnnnnnnnnnnnnnnnnnnnnnnnnnnnnnnnnnnnnnnnnnnnnnnnnnnnnnnnnnnnnnnnnnnnnnnnnnnnnnnnnnnnnnnnnnnnnnnnnnnnnnnnnnnnnnnnnnnnnnnnnnnnnnnnnnnnnnnnnnnnnnnnnnnnnnnnnnnnnnnnnnnnnnnnnnnnnnnnnnnnnnnnnnnnnnnnnnnnnnnnnnnnnnnnnnnnnnnnnnnnnnnnnnnnnnnnnnnnnnnnnnnnnnnnnnnnnnnnnnnnnnnnnnnnnnnnnnnnnnnnnnnnnnnnnnnnnnnnnnnnnnnnnnnnnnnnnnnnnnnnnnnnnnnnnnnnnnnnnnnnnnnnnnnnnnnnnnnnnnnnnnnnnnnnnnnnnnnnnnnnnnnnnnnnnnnnnnnnnnnnnnnnnnnnnnnnnnnnnnnnnnnnnnnnnnnnnnnnnnnnnnnnnnnnnnnnnnnnnnnnnnnnnnnnnnnnnnnnnnnnnnnnnnnnnnnnnnnnnnnnnnnnnnnnnnnnnnnnnnnnnnnnnnnnnnnnnnnnnnnnnnnnnnnnnnnnnnnnnnnnnnnnnnnnnnnnnnnnnnnnnnnnnnnnnnnnnnnnnnnnnnnnnnnnnnnnnnnnnnnnnnnnnnnnnnnnnnnnnnnnnnnnnnnnnnnnnnnnnnnnnnnnnnnnnnnnnnnnnnnnnnnnnnnnnnnnnnnnnnnnnnnnnnnnnnnnnnnnnnnnnnnnnnnnnnnnnnnnnnnnnnnnnnnnnnnnnnnnnnnnnnnnnnnnnnnnnnnnnnnnnnnnnnnnnnnnnnnnnnnnnnnnnnnnnnnnnnnnnnnnnnnnnnnnnnnnnnnnnnnnnnnnnnnnnnnnnnnnnnnnnnnnnnnnnnnnnnnnnnnnnnnnnnnnnnnnnnnnnnnnnnnnnnnnnnnnnnnnnnnnnnnnnnnnnnnnnnnnnnnnnnnnnnnnnnnnnnnnnnnnnnnnnnnnnnnnnnnnnnnnnnnnnnnnnnnnnnnnnnnnnnnnnnnnnnnnnnnnnnnnnnnnnnnnnnnnnnnnnnnnnnnnnnnnnnnnnnnnnnnnnnnnnnnnnnnnnnnnnnnnnnnnnnnnnnnnnnnnnnnnnnnnnnnnnnnnnnnnnnnnnnnnnnnnnnnnnnnnnnnnnnnnnnnnnnnnnnnnnnnnnnnnnnnnnnnnnnnnnnnnnnnnnnnnnnnnnnnnnnnnnnnnnnnnnnnnnnnnnnnnnnnnnnnnnnnnnnnnnnnnnnnnnnnnnnnnnnnnnnnnnnnnnnnnnnnnnnnnnnnnnnnnnnnnnnnnnnnnnnnnnnnnnnnnnnnnnnnnnnnnnnnnnnnnnnnnnnnnnnnnnnnnnnnnnnnnnnnnnnnnnnnnnnnnnnnnnnnnnnnnnnnnnnnnnnnnnnnnnnnnnnnnnnnnnnnnnnnnnnnnnnnnnnnnnnnnnnnnnnnnnnnnnnnnnnnnnnnnnnnnnnnnnnnnnnnnnnnnnnnnnnnnnnnnnnnnnnnnnnnnnnnnnnnnnnnnnnnnnnnnnnnnnnnnnnnnnnnnnnnnnnnnnnnnnnnnnnnnnnnnnnnnnnnnnnnnnnnnnnnnnnnnnnnnnnnnnnnnnnnnnnnnnnnnnnnnnnnnnnnnnnnnnnnnnnnnnnnnnnnnnnnnnnnnnnnnnnnnnnnnnnnnnnnnnnnnnnnnnnnnnnnnnnnnnnnnnnnnnnnnnnnnnnnnnnnnnnnnnnnnnnnnnnnnnnnnnnnnnnnnnnnnnnnnnnnnnnnnnnnnnnnnnnnnnnnnnnnnnnnnnnnnnnnnnnnnnnnnnnnnnnnnnnnnnnnnnnnnnnnnnnnnnnnnnnnnnnnnnnnnnnnnnnnnnnnnnnnnnnnnnnnnnnnnnnnnnnnnnnnnnnnnnnnnnnnnnnnnnnnnnnnnnnnnnnnnnnnnnnnnnnnnnnnnnnnnnnnnnnnnnnnnnnnnnnnnnnnnnnnnnnnnnnnnnnnnnnnnnnnnnnnnnnnnnnnnnnnnnnnnnnnnnnnnnnnnnnnnnnnnnnnnnnnnnnnnnnnnnnnnnnnnnnnnnnnnnnnnnnnnnnnnnnnnnnnnnnnnnnnnnnnnnnnnnnnnnnnnnnnnnnnnnnnnnnnnnnnnnnnnnnnnnnnnnnnnnnnnnnnnnnnnnnnnnnnnnnnnnnnnnnnnnnnnnnnnnnnnnnnnnnnnnnnnnnnnnnnnnnnnnnnnnnnnnnnnnnnnnnnnnnnnnnnnnnnnnnnnnnnnnnnnnnnnnnnnnnnnnnnnnnnnnnnnnnnnnnnnnnnnnnnnnnnnnnnnnnnnnnnnnnnnnnnnnnnnnnnnnnnnnnnnnnnnnnnnnnnnnnnnnnnnnnnnnnnnnnnnnnnnnnnnnnnnnnnnnnnnnnnnnnnnnnnnnnnnnnnnnnnnnnnnnnnnnnnnnnnnnnnnnnnnnnnnnnnnnnnnnnnnnnnnnnnnnnnnnnnnnnnnnnnnnnnnnnnnnnnnnnnnnnnnnnnnnnnnnnnnnnnnnnnnnnnnnnnnnnnnnnnnnnnnnnnnnnnnnnnnnnnnnnnnnnnnnnnnnnnnnnnnnnnnnnnnnnnnnnnnnnnnnnnnnnnnnnnnnnnnnnnnnnnnnnnnnnnnnnnnnnnnnnnnnnnnnnnnnnnnnnnnnnnnnnnnnnnnnnnnnnnnnnnnnnnnnnnnnnnnnnnnnnnnnnnnnnnnnnnnnnnnnnnnnnnnnnnnnnnnnnnnnnnnnnnnnnnnnnnnnnnnnnnnnnnnnnnnnnnnnnnnnnnnnnnnnnnnnnnnnnnnnnnnnnnnnnnnnnnnnnnnnnnnnnnnnnnnnnnnnnnnnnnnnnnnnnnnnnnnnnnnnnnnnnnnnnnnnnnnnnnnnnnnnnnnnnnnnnnnnnnnnnnnnnnnnnnnnnnnnnnnnnnnnnnnnnnnnnnnnnnnnnnnnnnnnnnnnnnnnnnnnnnnnnnnnnnnnnnnnnnnnnnnnnnnnnnnnnnnnnnnnnnnnnnnnnnnnnnnnnnnnnnnnnnnnnnnnnnnnnnnnnnnnnnnnnnnnnnnnnnnnnnnnnnnnnnnnnnnnnnnnnnnnnnnnnnnnnnnnnnnnnnnnnnnnnnnnnnnnnnnnnnnnnnnnnnnnnnnnnnnnnnnnnnnnnnnnnnnnnnnnnnnnnnnnnnnnnnnnnnnnnnnnnnnnnnnnnnnnnnnnnnnnnnnnnnnnnnnnnnnnnnnnnnnnnnnnnnnnnnnnnnnnnnnnnnnnnnnnnnnnnnnnnnnnnnnnnnnnnnnnnnnnnnnnnnnnnnnnnnnnnnnnnnnnnnnnnnnnnnnnnnnnnnnnnnnnnnnnnnnnnnnnnnnnnnnnnnnnnnnnnnnnnnnnnnnnnnnnnnnnnnnnnnnnnnnnnnnnnnnnnnnnnnnnnnnnnnnnnnnnnnnnnnnnnnnnnnnnnnnnnnnnnnnnnnnnnnnnnnnnnnnnnnnnnnnnnnnnnnnnnnnnnnnnnnnnnnnnnnnnnnnnnnnnnnnnnnnnnnnnnnnnnnnnnnnnnnnnnnnnnnnnnnnnnnnnnnnnnnnnnnnnnnnnnnnnnnnnnnnnnnnnnnnnnnnnnnnnnnnnnnnnnnnnnnnnnnnnnnnnnnnnnnnnnnnnnnnnnnnnnnnnnnnnnnnnnnnnnnnnnnnnnnnnnnnnnnnnnnnnnnnnnnnnnnnnnnnnnnnnnnnnnnnnnnnnnnnnnnnnnnnnnnnnnnnnnnnnnnnnnnnnnnnnnnnnnnnnnnnnnnnnnnnnnnnnnnnnnnnnnnnnnnnnnnnnnnnnnnnnnnnnnnnnnnnnnnnnnnnnnnnnnnnnnnnnnnnnnnnnnnnnnnnnnnnnnnnnnnnnnnnnnnnnnnnnnnnnnnnnnnnnnnnnnnnnnnnnnnnnnnnnnnnnnnnnnnnnnnnnnnnnnnnnnnnnnnnnnnnnnnnnnnnnnnnnnnnnnnnnnnnnnnnnnnnnnnnnnnnnnnnnnnnnnnnnnnnnnnnnnnnnnnnnnnnnnnnnnnnnnnnnnnnnnnnnnnnnnnnnnnnnnnnnnnnnnnnnnnnnnnnnnnnnnnnnnnnnnnnnnnnnnnnnnnnnnnnnnnnnnnnnnnnnnnnnnnnnnnnnnnnnnnnnnnnnnnnnnnnnnnnnnnnnnnnnnnnnnnnnnnnnnnnnnnnnnnnnnnnnnnnnnnnnnnnnnnnnnnnnnnnnnnnnnnnnnnnnnnnnnnnnnnnnnnnnnnnnnnnnnnnnnnnnnnnnnnnnnnnnnnnnnnnnnnnnnnnnnnnnnnnnnnnnnnnnnnnnnnnnnnnnnnnnnnnnnnnnnnnnnnnnnnnnnnnnnnnnnnnnnnnnnnnnnnnnnnnnnnnnnnnnnnnnnnnnnnnnnnnnnnnnnnnnnnnnnnnnnnnnnnnnnnnnnnnnnnnnnnnnnnnnnnnnnnnnnnnnnnnnnnnnnnnnnnnnnnnnnnnnnnnnnnnnnnnnnnnnnnnnnnnnnnnnnnnnnnnnnnnnnnnnnnnnnnnnnnnnnnnnnnnnnnnnnnnnnnnnnnnnnnnnnnnnnnnnnnnnnnnnnnnnnnnnnnnnnnnnnnnnnnnnnnnnnnnnnnnnnnnnnnnnnnnnnnnnnnnnnnnnnnnnnnnnnnnnnnnnnnnnnnnnnnnnnnnnnnnnnnnnnnnnnnnnnnnnnnnnnnnnnnnnnnnnnnnnnnnnnnnnnnnnnnnnnnnnnnnnnnnnnnnnnnnnnnnnnnnnnnnnnnnnnnnnnnnnnnnnnnnnnnnnnnnnnnnnnnnnnnnnnnnnnnnnnnnnnnnnnnnnnnnnnnnnnnnnnnnnnnnnnnnnnnnnnnnnnnnnnnnnnnnnnnnnnnnnnnnnnnnnnnnnnnnnnnnnnnnnnnnnnnnnnnnnnnnnnnnnnnnnnnnnnnnnnnnnnnnnnnnnnnnnnnnnnnnnnnnnnnnnnnnnnnnnnnnnnnnnnnnnnnnnnnnnnnnnnnnnnnnnnnnnnnnnnnnnnnnnnnnnnnnnnnnnnnnnnnnnnnnnnnnnnnnnnnnnnnnnnnnnnnnnnnnnnnnnnnnnnnnnnnnnnnnnnnnnnnnnnnnnnnnnnnnnnnnnnnnnnnnnnnnnnnnnnnnnnnnnnnnnnnnnnnnnnnnnnnnnnnnnnnnnnnnnnnnnnnnnnnnnnnnnnnnnnnnnnnnnnnnnnnnnnnnnnnnnnnnnnnnnnnnnnnnnnnnnnnnnnnnnnnnnnnnnnnnnnnnnnnnnnnnnnnnnnnnnnnnnnnnnnnnnnnnnnnnnnnnnnnnnnnnnnnnnnnnnnnnnnnnnnnnnnnnnnnnnnnnnnnnnnnnnnnnnnnnnnnnnnnnnnnnnnnnnnnnnnnnnnnnnnnnnnnnnnnnnnnnnnnnnnnnnnnnnnnnnnnnnnnnnnnnnnnnnnnnnnnnnnnnnnnnnnnnnnnnnnnnnnnnnnnnnnnnnnnnnnnnnnnnnnnnnnnnnnnnnnnnnnnnnnnnnnnnnnnnnnnnnnnnnnnnnnnnnnnnnnnnnnnnnnnnnnnnnnnnnnnnnnnnnnnnnnnnnnnnnnnnnnnnnnnnnnnnnnnnnnnnnnnnnnnnnnnnnnnnnnnnnnnnnnnnnnnnnnnnnnnnnnnnnnnnnnnnnnnnnnnnnnnnnnnnnnnnnnnnnnnnnnnnnnnnnnnnnnnnnnnnnnnnnnnnnnnnnnnnnnnnnnnnnnnnnnnnnnnnnnnnnnnnnnnnnnnnnnnnnnnnnnnnnnnnnnnnnnnnnnnnnnnnnnnnnnnnnnnnnnnnnnnnnnnnnnnnnnnnnnnnnnnnnnnnnnnnnnnnnnnnnnnnnnnnnnnnnnnnnnnnnnnnnnnnnnnnnnnnnnnnnnnnnnnnnnnnnnnnnnnnnnnnnnnnnnnnnnnnnnnnnnnnnnnnnnnnnnnnnnnnnnnnnnnnnnnnnnnnnnnnnnnnnnnnnnnnnnnnnnnnnnnnnnnnnnnnnnnnnnnnnnnnnnnnnnnnnnnnnnnnnnnnnnnnnnnnnnnnnnnnnnnnnnnnnnnnnnnnnnnnnnnnnnnnnnnnnnnnnnnnnnnnnnnnnnnnnnnnnnnnnnnnnnnnnnnnnnnnnnnnnnnnnnnnnnnnnnnnnnnnnnnnnnnnnnnnnnnnnnnnnnnnnnnnnnnnnnnnnnnnnnnnnnnnnnnnnnnnnnnnnnnnnnnnnnnnnnnnnnnnnnnnnnnnnnnnnnnnnnnnnnnnnnnnnnnnnnnnnnnnnnnnnnnnnnnnnnnnnnnnnnnnnnnnnnnnnnnnnnnnnnnnnnnnnnnnnnnnnnnnnnnnnnnnnnnnnnnnnnnnnnnnnnnnnnnnnnnnnnnnnnnnnnnnnnnnnnnnnnnnnnnnnnnnnnnnnnnnnnnnnnnnnnnnnnnnnnnnnnnnnnnnnnnnnnnnnnnnnnnnnnnnnnnnnnagcattctgagaaattactttgtgatgtgtgcattcatcacaaagagttgaacctttcttttggttgagcagttttgaagcactctttttgtagaatctgtaagtggatatttggagttctttgaggcttatggtggtaaaggaaatatcttcacacaaaaactacacagaaccattctgaaatacctctttgtgatgcttgcattcatctcacatagttgaaccattctttttattgagcagttttgaaacaatctccttgtagaatgtgcaagtggatatttggaatgctttgatgagtatggtggaaaatgaaaaatcttcacataaaaactagacagaattactctgagaaacttctttgtgatgtgcacattcatctcacaaatttgaaaatttcttttgattgagcagttttgaaacgctctttttctagaatctgccagtggttatttggagtgctttgagtcctatggtggagaaggaaatatcctcacataaaaactagagagaagcattctgagaaacttctttctgatgtgtgcatacatctcacggagttgaaactttctattgatttagcattttttatacactttttgtaggatctgcagttgctatttggagccctttggggccaatggtggaaaagtactatcttctcataaaaactagacagaagcattctgagaaacttcttggtgatgtgtgcattcatctcacagtagttgaacctttcttttgattgagcagttttgaaacgctcttttcgttgaatctgcaagtgcatatttagagtgctttgaggcacgtggtggaaaaggaaatatcttcacataaacactagacagaagcattctgagaaatgtctttgtgatgtgtccattcacttcacagagttgaaactttcttttcattgagcagttttgaaacactctttttatagaatatgcaagtggatatttggagcgttttggagagaatggtggaaatggaaatatcttcatataaaaactacggagaagcattcggagaaacggctttgttatgtgtgacttcagctcacacagttgaacctttcttttgattgagcatttttgattccctctttttgtagaatctgcaagtggatatttggagagctttagggcctacggtggaaaaggaaatatcttcacataaaaactacacaaaagcattctgagaaacttctttctgatgtgtgcatacaactcacagagtcgaaactttcttttgattgtgcagttttgaaacacttcttttgtagaatctgcaagtggatattcagagggctttgtggagtatagtggaaaaggaaataactttggataaaagctagacagcagaattctgagaaacttctttgtgatgtgtgcattcaacgtacagagttgaacctttctttagatttggcagttttgaaacactacttttgtaatatctgcaagtggatatttggtgaccattgcagcctatggtggaaaggcaaatatcttcacataaaaactagaccaaggcattctgagaatcttctttgtgatgtgtgcattcttctcacacagttcaacttttcttttgattcagcagtttggaaacagtatttttctacaatctgcaaagggatacttcttagccgatttaggcctatggtgaattaggaaatatcttcacataaaaaataaacagaaactttctgagaaacttctttgggatgtgtgttttcatctcacagagatgaaactttcttttgattgagcaatttggaaactctctttttgtaggatctgcaaatggatatttagagtgctttgaggcctgtggtgaaaaaggaaatatctccacataacaactagacagaagcattctgggaacatctttgtgatgtgtgcattcatctcacagagttgaacctttcttttgattgagtagtttggaaacagtctttgatagtatctgcagagagatatttgtgagcattttgaggactttggtgagaaaagaaatatcttcatataaaacctagtcagaagcattctgagaaacttctttgtgatgtgtgcattcatctgacagagttgaaactttgttttgattgagcagtttggaaacagtccttttgtaggatctgcaaagggatatttctgagcccattgagacctatggtgaaagaagaaatatcttcacttaaaaactagacataagcattctgagaaacttcttagtgatgtgtgctttcatctcacaggtttgaactttcttttgattgagcagtttggaaacagtgtttttgtagaatctgcaaaggatattttgagcgctttgacgcctatggtgaaaaaggacatatcttcacatgaaatctaaacagaagctttctgagaaacttcttttttatgagttcatacatctcacagaggtgaaactttcttttcattgagcagtttggaaacagtctttttgtacagtctgcaaaggaaatatctgcgaagttggaggcctatggtgaaaaagaaatatcttcagataaaatgtagacagatgtattctgagaaaattttttgtgatgtatccattcatctcacagagttgaaattttcttttgatggagcagtctggaaacagtctttttgtagtatctgaagaggtatatgtgagaacagtttaaggcctctggtggaaaaggaaatatcttcacataaaactaggtagaagcattctaagaaacttctttgtattgtgtgcattcatctcaaagacttgaacctgtatttggactgagcagtttggaaactgtcgttttgtagaatctgtgaagggatatttctgagcccattgaggcctatggatgaaataggaaatatcttcacataaaaactagacagaggatttctgagaaccttctttgtcatatgtggtttcatctcacagagttgaaccattcttttggttgagcagttaggaaacagtctttttgtaggatctgcaaagagatatttctgttcccattgatgcctatggtgaaaaaggacatatcttcacataaaaactagacagaagctttctgataaacttcttagtgatgtgtgctttcatgtcacagatttgaaactttcttttgattgatcagtttggaaacagtctttttgtagaatctgcaaatggatatttggagtgctttgaggcctatggtgaaaaaggaaataccttcacatgaaatataaacagaagctttctgagaaacttctttttgatgcgtgcatacatctcacagagttgaatatttcttttcattgagcagtttggaaacagtctttttgtacaatctggaatgggatatttctgagaagttggaggcctatatcgaaaaagaaatagtattctgagaaacttctttgagatgtatcctttcatctcacagaattgaaccttacttttgatggagcagtttggagacagtctttttgtagtatctgcggagggatatctgagagcagtttaaggcctatggtgaaaaaggaaatatcttcacataaaaactaggcagaagcattctgagaaacttctttgtgatgtatgcattcaactcaaagaggtgaaactttctttggattgagcagtttggaaatagtccttttgcagaatctgcaaagggatatttctcagtccattgaggcctatggtgaaataggaaataacttctcataaaaaccagacagaaggtttctgagaaacttctttgagatatgtgctttcatctcacagagctgaacctttcttttggctcagaagtttggaaacagtctttgtgtagaatctgcaaagcgctatttttgagcaccttctggactgtggtgaaacagaaaatatcttcacataaaaactagacagaagctttctgagaaacttctttatgatgtgttctttcatctcacagagttgtaaatttcctttgattgagcagtttggaaacactctttatggggaatctgcaagtggatatttggagtgctttgtggcctatagtggaaaatgaaatatcttcacataaaaactagatagaatcattctgagaaacttctttgtgatgtgcacattcatcacaaagagttgaacatttctttcgattcagcagtttggaaacagtccttatgtagaatctgtgaagggatatttctcagaccattgatgcctatggatgaaataggaaatattctcacaaaaaaactagacagaaaatttctgagaaacttctttatgatatgtggtttcatctcacagagttgaaccgttcttttgtttgagcagtttggaaacacattttttgtagaatctgcaagtggatatttggagcacattgaggcctatggtggaaaacggaatattttcacataaaaattagacagaatcattctgagaaacttctttgtgatgtgtgcattcaacccacagagttcaacctttctttagattcaacagttttgaaacactctttttgtaaaatctgccagtggatttttggaacgctttgaggcctacggtggaaaaggaaatatcttcacataaatagtacatagaagcattctgagaaacttctttgtgatgtgtgcatttaactcaaagagtgcaatccttcttttgattgagcagttttgaaagactccttttgtagaatctgtaagtggatatttggagcgctatgtggccttaagtggaaaaggcaatatcttcacataaaaactagacaacagcattctgagaaacttctttgtcatgtgtgcattcatctcacagagttgaagctttcttttgattgagcagttttgaaacactctttttgtagaatctccaattggatacttggagcgttttgaggcttatggtagaaaagtaaatattttcacgtgaaaactacacagaagcattctgagaaattggtttgtgatgtgtgcattcaacacacagagttgaacctttcttttgatttagcagttttgaaacacacttttttttggatctgcaagtggatatttggagtgctttgtggcctaatgcggaaaaggatatattttcacataaaaactatggagaagcattctgagaaacttctttgtgatgtgtgcattcatctcacagagttcaacctttcttttgattgagcagttttgaaacgctctttttgtagagtgtgcaagcagatatttggagctctttgaggcttatggtggaaaaggaaatatcttcacataaaaactacagagaagcattctgacaaagttctttgtgttgtgtgtgttcaactcacagagttgagtctttcttttgattgagcagttttgaaacactctttttttagaatctgcaagtggatatttcgagtgctttgcagcctctgttggaaaaggaaatatcttcacataaactagacagaagcattctgagaaacttccttgtgatgtgtgcattcatctcacagagaggaaactttcttttgattgtgaagttttcaaacactctttttgtataatctgcaagtggatatttggaggtctttgtggcctataggggaaaaggaaatatcttcacataaaaactacagagaagcattctgaaaaacatctttgtgatgtgtgcattcatctcaaagagttcaacctttcttttgattgagcacttttgaaatactttttggagaatctgtaagtggatatttggagggctttgggtcctatggtggtaaaggaaacatcttcacataaaaactacacagaagcattctgaaatacctctttgtgatgcttgcattcatctcacatagttgaaccattctttttattgagcagttttgaaacaatctccttgtagaatgtgcaagtggatatttggaatgctttgatgagtatggtggaaaatgaaaaatcttcacataaaaactagacagaagtactctgagaaacttctttgtgatgtgcgcattcatctcagatttgaaaatttcttttgattgagcagttttgaatcgctctttttttaggatctgccaggggatatttggagtgctttgaggcctatggtggagaaggaaatatcctcacataaaaattagagagaaggattctgagaaacttctttgtgatgtgtgcatacatctcacagagtttaaactttctattgatttagcattttttaaacactttttgtaggatctgcagtggatatttggagccctttggggcctatggtggaaaagaattatcttctcataaaaactagacagaagcattttgagaaacttctctgtgatgtgttcattcatctcacagatttgaaccattcttttgattcagcagttttgaaacactcttcgtagaatctgcaagtgcatatttagatcgctttgagaagtgtggtggaaaaggaaatatcttcacataaacactagacagaagcattctgagaaacgtctttatgatgtgtccattcatctcacagagttgaaactttcttttcattgagcagttttgaaacactctttttatagaatctgcaagtagatatttggagtgctttggagagaatggtggaaacggaaatatcttcatataaaaactacggagaagcattctgagaaacggctttgttatgtgtgccttcaactcacagagttgaaactttcttttgattgaacagttttgaatcccgctttttgtagaatctgcaagtggatatttggagagctttggggcctatggtggaaaaggaaatatcttcacataaaaactacacaaaagcattctgagaaacttctttctgatgtgcgcatacaactcccagagttgaacctttcttttgattgtgcaattttgaaacacttcttttgtagaatctgcaagtggatattcggagggctttgccgagtatagtggaaaaggaaataactttggataaaaggtagacagaaacattctgagaaacttctatgtgatgtgtgcattcaacgtacagagttgaacctttctttagatcgggcagttttgaaacactatttttgtaatatctgcaagtggatatttgatgaccattgcagcctatggtggaaaggcaaatatcttcacataaaaactagacagaagctttctgagaaacttctttgcgatgtgtgcattcatttcacagagttcaacttttcttttgattcagcagtttggaaacagtatttttgtacaatctgcaaagggatacttcttagccaatttaggcctattgtgaattaggaaatatcttcacataaaaaataaatggaagctttctgagaaacttctttgggatgtgtgttttcatctcacagagatgaaactttcttttgattgagcagtttcgaaactctctttttgtaggatctgcaaatggatatttggagcgctttgaggcctgtggtgaaaaaggaaatatcttcacataacaaccagacagaagcattctggaaacatttttgtgatgtgtgcattcatctcacagagttgaacctttcttttgattgagcagtttggaaacagtcttttatagtatctgcagagagatatttgtgagcattttgaggacttttgtgagaaaggaaatatcttcatataaaacctagtcagaagattctgagaaacttctttgtgatgtgtgcattcaactgatagagttgaaactttgttttgattgagcagtttgtaaacagtccttttgtaggatctgcaaagggatagttctgggcccattgagacctatggtgaaagaagaaatatcttcacttaaaaactagacagaagcattctgagaaacttcttagtgatgtgtgctttcatctcacaggtttgaactttcttttgattgagcagtttggaaacagtgtttttgtagaatcttcaaaggatattttgagcgctttgacgcctatggtgaaaaaggacatatcttcacatgaaatctaaacagaagctttctgagaaacttcttttttatgagttcatacatctcacagaggtgaaactttcttttcattgagcagtttggaaacagtctttttgtacagtctgcaaacaaaatttctgcgaagttggaggcctatcgtgaaaaagaaatatcttcagataaaatgtagacagaagtattctgagaaaattttttgtgatgtatctattcatctcacagagttgaatttttcttttgatggagcagtctggaaacagtctttttgtagtatctgcagagggatgtgtgagagcagtttaaggcctgtggtgagaaaggaaatatcttcacataaaaactaggtagaagcattctaagaaacttctttgtattgcgtgcattcatctcaaagacttgaacttgtctttggactgagcagtttggaaactgtcgttttgtagaatctgtgaagggatatttctgagcccattgaggcctatggatgaaatatgaaatatcttcacataaaaactagacagaggatttctgagaaacttctttgtgatatgtggtttcatctcacagagttgaaccattcttttggttgagcagttaggaaacagtctttttgtaggatctgcaaagggatatttctgttcccattgatgcctatggtgaaaaaggacatatcttcacataaaaactagacagaagctttctgataaacttcttagtgatgtgtgctttcatgtcacagatttgaaactttcttttgattgagcagtttggaaacagtctttttgtagaatctgcaaatggatatttggagtgctttgaggcctatggtgaaaaaggaaataccttcacatgaaatataaacagaagctttctgagaaacttctttttgatgcgtgcatacatctcacagagttgaacgtttcttttcattgagcagtttgaaaacagtctttttgtacaatctggaatgggatatttctgagaagttggaggcctatatcgaaaacgaaatatcttcacataaaaactagacagaagtattctgagaaacttctttgagatgtatcctttcatttcacagagttgaaccttacttttgatggagcagtttggagacagtctttttgtagtatctgcagagagatatctgagagcagtttaaggcctacggtgaaaaaggaaatatcttcacaaaaacctaggcagaagcattctgagaaacttctttgtgatgtatgcattcatctcaaagaggtgaaactttctttggattgagcagtttggaaacagtccttttgtagaatctgcaaagggatatttctcagcccattgaggcctatggtgaaataggaaatatcttcccataaaaaccagacagaaggtttctgagaaacttctttgagatatgtgctttcatctcacagagctgaacctttcttttggttcagaagtttggaaacagtctttgtgtagaatcttcaaagggctatttttgagcaccttctggactatggtgaaacagaaaatatcttcacataaaaactagacagaagctttctgagaaacttctttatgatgtgttctttcatctcacagagttgtaactttcctttgattgagcagtttggaaacactctttatggggaatctgcaagtggatatttggagtcctttgtggcctatagtggaaaacgaaatatcttcacataaaaactagacagaatcattctgagaaacttctttgtgatgtgcacattcatcacaaagagttgaacatttctttcgattgagcagtttggaaacagtccttttgtagaatctgtgaagggatatttctcagcccattgatgcctatggatgaaataggaaatattctcacataaaaactagacagaaaatttctgagaaacttctttatgatatgtggtttcatctcacagagttgaaccgttcttttgtttgagcagtttgggaacacattttttgtagaatctgcaagtggatatttggagcacattgaggcctatggtggaaaacggaatattttcacataaaaattagacagaagcattctgagaaactactttgtgatgtgtgcattcaacccacagagttgaacctttcttttgattcagcagttttgaaacactctttttgtaaaatctgacagtggatttttggagtgctttgaggcttacggtggaaaaggaaatatcttcacataaatagtacacagaagcattctgagaaacttctttgtgatgtgtgcgtttaactcaaagagtgcaatccttctttagattgagcagttttgaaagacttattttgcagaatctgcaagtggatgtttggagcgctatgtggccttaagtggaaaaggcaatatcttcacataaaaactagacaacagcattctgagaaacttctttgtcatgtttgcattcatctcacagagttgaagctttcttttgattgagcagttttgaaacactctttttgtagaatctccagttggatacttggagcgttttgaggcctatggtagaaaagtaaatatcttcacgtgaaaactacacagaagcattctgagaaattggtttgtgatgtgtgcattcaacacacagagttgaacctttcttttgattgagtagttttgaaacacacttttttttaggatctgcaagtggatatttggagtgctttgtggcctaatgaggaaaaggatatattttcacataaaaactacggagaagcattctgagaaacttctttgtgatgtgtgcattcatctcacagagttcaacctttcttttgattgagcagttttgaaacgctctttttgtagagtgtgcaagcggatatttggagctctttgaggcttatggtggaaaaggaaatatcttcacataaaaactacagagaagcattctgacaaagttctttgtgttgtgtgtgttcaactcacagagttgagtctttcttttgattgagcagttttgaaacactcttcttttagaatctgcaagtggatatttcgagtgctttgcagcctctgttggaaaaggaaatatcttcacataaactagacagaagcattctgtgaaacttccttgtgatgtgtgcattcatctcacagagttgaaactttcttttgattgtgaagttttcaaacactctttttgtgcaatctgcaagtggatatttggaggcctttgtggcctacaggggaaaaggaaatatcttcacataaaaactagacagaagcattctgagaaacatctttgtgatgtgtgcattcatctcaaagagttcaacctttcttttgattgagcacttttgaaataccttttggagaatctgtaagtggatatttggagggctttgggtcttatggtggtaaaggaaacatcttcacataaaaactacacagaagcattctgaaatacctctttgtgatgcttgcattcatctcacatagttgaaccattctttttattgagcagttttgaaacaatctccctgtagaatgtgcaagtggatatttggaacgctttgatgagtatggtggaaaatgaaaaatcttcacataaaaactagacagaagtactctgagaaagttctttgtgatgtgcgcattcatctcacagatttgaaaatttcttttgattgagcagttttgaaactctctttttctagaatctgccagtggatatttggagtgctttgaggcctatggtggagaaggaaatatcatcacataaaaactagagagaagcattctgagaaacttctttgtgatgtgtgcatacatctcacggagttgaaactttctattgatttagcattttttatacactttttgtaggatctgcagttgctatttggagccctttggggccaatggtggaaaagtattatcttctcataaaaactagacagaagcattttgagcaaattctttgtgatgtgttcgttcatctcacagatttgaaccattcttttgattcagcagttttgaagcactcttcctagaatctgcaagtgcatatttagatcgctttgagacgtgtggtggaaaaggaaatatcttcacataaacactagacagaagcattctgagaaacgtctttgtgatgtgtccattcatctaacagaggtgaaactttcttttcattgagcagttttgaaacactctttttatagaatctgcaagtggatatttggagcactttggagagaatggtggaaatggaaatatcttcatataaaaactatggagaagcattctgagaaacggcattgttatgtgtgccttcagctcacagagttcaacctttcttttgattgagcagttttgattccctttttttgtagaatctgcaagtggatatttggagagttttagggcctatggtggaaaaggaaatatcttcacataaaaactacacaaaaacattctgagaaacttctttctgatgtgtgcatacaactcccagagttgaatctttcttttgattgtgcaattttgaaacacttcttttgtagaatctgcaagtggatattaggagggctttgccgagtatagtggaaaaggaaataactttggataaaaggtagacagaagcattctgagaaacttctttgtgatgtgtgcattcaacgtacagagttgaacctttctttagattgggcagttttgaaacactatttttgtaaaatctgcaagtggatatttggtgacgattgcggcctatgatggaaaagcaaatatcttcacataaaaactagacagaagcattctgagaaacttctttgtgatgtgtgcattcatctcacacagttcaacttttcttctgattcagcagtttggaaacagtatttttgtacaatctgcaaagggatacttcttagccgatttcggtctatggtgaattaggaaatatcttcacataaaaactagacagaagctttctgagaaacttctttgggatgtgtgttttcatctcagagagatgaaactttcttttgattgagcaatttcgaaactttctttttgtaggatctgcaaatggatatttggagcgctttgaggcctgtggtgaaaaaggaaatatcttcacataacaaccagacagaagcattctggaaacatctttgtgatgcgtgcattcatctcgcagagttgaacatttcttttgattgagcagtttggaaacagtctttgatagtatctgcagtgagatatttgtcagcattttgaggacttggtgagaaaggaaatatcttcatataaaacctagtcagaagattctgagaaacttctttgtgatgtgtgcattcaactgatagaggtgaaactttgttttgattgagcagtttgtaaacagtccttttgtaggatctgcaaagggatagttctgggcccattgagacctatggtgaaagaagaaatatcttcacttaaaaactagacagaagcattctgagaaacttcttagtgatgtgtgctttcatctcacaggtttgaacctttcttttgattgagcagtttggaaacagtctttttgtagaatctgcaaaggatacttcaagcactttgaggcctatggtgaaaaaggacatatcttcacatgaaatctaaacagaagctttctgagaaacttccttttgatgactgcatacatctcacagaggtgaaactttcttttcattgagcagtttggaaacagtctttttgtaaaatctgcaaaggaatatttctgcgaagttagaggcctatggtgaaaaagaaatatcttcagataaaatgtagacagaagtattctgagaaaattttttgtgatgtatctattcatctcacggagttgaatttttcttttgatggagcagtgtggaaacagtctttttgtagtatctgaagagggatatgtgagagaagtttaaggcctgtggtgaaaaaggaaatatcttcacataaaaacaaggtagaagcattctaagaaacttctttgtattgtttgcattcatctcaaagacttgaacctgtctttggactgagcagtttggaaactgtcgttttgtagaatctgtgaagggatatttctgagcccattgaggcctatggatgaaataggaaatatcttcacataaaaacaagacagaggatttctgagaaacttctttgtgatatgtggtttcatctcacagagttgaaccattcttttggttgagcagttaggaaacagtatttttgtgggatctgcaaagggatatttctgttcccattgacgcctatggtgaaaaaggacatatcttcacataaaaactagacagaagctttctgataaacttcttagtgatgtgtgctttcatgtcacagatttgaaactttcttttgattgatcagtttggaaacagtctttttgtagaatctgcaaatggatatttggagtgctttgaggcttatggtgaaaaaggaaataccttcacatgaaatataaacagaagctttctgagaagcttctttttgatgcatgcatacatctcacagagttgaaagtttcttttcattgagcagtttggaaacagtctttttgtacaatctggaaagggatatttctgagaagttggaggcctatatcgaaaaagaaatatcttcacataaaaactagacagaagtattctgagaaacttctttgagatgtatcctttcatctcacagagttgaaccttacttttgatggagcagtttggagacagtctttttgtagtatctgcggagggatatctgagagcagtttaaggcctgtggtgaaaaaggaaatatcttcacataaaaactaggcagaagcattctgagaaacttctttgtgatgtatgcattcaactcaaagaggtgaaactttctttggattgagcagtttggaaacagtccttttgtagaatctgcaaaagggttgtttctcagcccattgagacctatggtgaaataggaaatatcttctcataaaaaccagacagaaggtttctgagaaacttctttgagatatgtgctttcatctcacagagctgaacctttcttttggttcagaagtttggaaacagtctttgtgtagaatctgcaaagcactatttttgagcaccttctggactatggtgaaacagaaaatatcttcacataaaaactagacagaagctttctgagaaacttctttatgatgtgttctttcatctcacagagttgtaactttcctttggttgagcagtttggaaacactctttatggggaatctgcaagtggatatttggagtcctttgtggcctatagtggaaaacgaaatatcttcacataaaaactagacagaatcattctgagaaacttctttgtgatgtgcacgttcatcacaaagagttgaacatttctttcaattcagcagtttggaaacagtccttttgtagaatctgtgaagggatatttctcagcccattgatgcctatggatgaaataggaaatattctcacattaaaaactagacagaaatttctgagaaacttctttgtgatatgtggtttcatctcacagagttgaaccgttcttttggttgagaagattggaaacactctttttgtagaatctgcaagtggatatttggagcacattgaggcctatggtggaaaacgaaatattttcacataaaaattagacagaagcattctgagaaactactttgtgatgtgtgcattcaacccacagagttcaacctttcttttgattcagcagttttgaaacactctttttgtaaaatctgacagtggatttttggagcgctttgaggcctacagtggaaaaggaaatatcttcacataaatagtacacagaagtattctgagaaacattttgtgatgtgtgcattcatctcacagagttgaacctttctttttattgagcagtttggaaactgtatttttgtagaatctgcaagtggatatttggagcactttgaggcccatggtggaaaaggacatatcttcccataaaaactagacagcagcattttgagaaacttctttgtgatgtgtggattcatctcacagagttgaagctttcttttgattgagtagtattgaaacactcttgtggaatctccaattagatacttggagcgctttgaggcctatggtggaaaaggaaatatcttcacatgaaaactacacagaagcattctgagaaattggtttgtgatgtgtgcattcaacacacagagttgaacctttcttttgattgagcagttttgaaacacactttttttaggatctgcaagtggatatttggagtgctttgtggcctactgcggaaaaggatatatcttcacataaaaactacggagaagcattctgagaaacttctttgtgatgtgtgcattcatctcacagagttcaacctttcttttgattgagcagttttcaaccactctttttgtagagtgtgcaagtggatatttggagcactttgaggcttatggtgggaaaggaaatatcttcacataaaaactacagcgaagcattctgagaaacttctttcttatgcgtgcattcaactcacagaattgaacctttcttttgattgagcagttttgaaacactatttttgtaaaatctacaagtgtatattgggtgcaatttgcatccaatggtggaaaagcaaatatcttcacataaaaactagacagaagcattctgagaatcttctttgtgatgtgtacattcacttcacagagttataactttttttattgaggacttttgaaacactctttttgtagaatctacaagtgggtgtttggagcactttgtggcctatagtggaaaaggatgtatattcacataaaaactagacagacaagcattctgaaaaacatctttgtgatgtgtgcattcatctcaaagagttcaacctttcttttgattgagcacttttgaaatactttttggagaatctgtaagtggatatttggagggctttgggtcctatggtggtaaaggaaacatcttcacataaaaactacacagaagcattctgaaatacctctttgtgatgcttgcattcatctcacatagttgaaccattctttttattgagcagttttgaaacaatctccttgtagaatgtgaaagtggatatttggaacgctttgaggagtatggtggaaaatgaaaaatcttcacataaaaactagacagaattactctaagaaacttctttgtgatgtgcacattcatctcacaaatttgaaaatttcttttgattgagcagttttgaaacgctctttttctagaatctgccagtgtttatttggagtgcattgagtcctatggtggagaaggaaatatcctcacataaaaactagagagaagcattctgagaaacttctttgtgatgtgtgcatacatctcacagagttgaaactttctattgatttagcattttttatacactttttgaaggatctgcagttgttatttggagccctttggggccaatggtggaaaagtattatcttctcataaaaactagacagaagcattttgagaaacttctctgtgatgtgttcattcatctcacagatttgaaacattcttttgattcagcagttttgaaacactcttcgtagcatctgcaagtgcatatttagatcgctttgagaagtgtggtggaaaaggaaatatcttcacataaacactagacagaagcattctgagaaacgtctttgtgatgtgtccattcatttcacagagttgaaactttcttttcattgagcagttttgaaacactctttttatagaatctgcaagtggatatttggagcgctttggagagaatggtggaaaaggaaatatcttcatataaaaactatggagaagcattctgagaaacagcattgttatgtgagccttcagctcacggagttgaacctttcttttgattgagcagttttgaatccctctttttgtataatctgcaagtggatatttggagagctttagggcctatggtggaaaaggaaatatcttcacataaaaactacacaaaagcattctgagaaacttctttctgatgtgtgcatacaactcccagagttgaatctttcttttgattgtgcaattttgaaacacttcttttgtagaatctgcaagtggatattcggagggctttgccgagtatagtggaaaaggaaataactttggataaaaggtagacagaaacattctgagaaacttctttgtgatgtgtgcattcaacgtacagagttgaacctttctttagatcgggcagttttgaaacactatttttttaatatctgcaagtggatatttggtgaccattgcagcctatggtggaaaggcaaatatcttcacataaaaactagacagaagcattctgagaatcttctttgtgatgtgtgcattcatctcacacagttcaacttttcttttgattcagcagtttggaaacagtatttttctacaatctgcaaaaggatacttcttagccgatttaggcctatggtgaattaggaaatatcttcacataaaaaataaacagaagctttctgagaaacttctttgggatgtgtgttttcatctcacagagatgaaactaccttttgattgagcaatttggaaactctctttttgtaggatctgcaaatggatatttggagtgctttgaggcctgtggtgaaaaaggaaatatcttcacataacaaccagacagaagcattctggaaacatttttgtgatgtgtgcgttcatctcacagagttgaacctttcttttgattgagcagtttggaaacagtcttttatagtatctgcagagagatatttgtgagcattttgaggactttggtgagaaaggaaatatcttcatataaaacctagtcagaagattctgagacacttctttgtgatgtgtgcattcaactgacagagttgaaactttgttttgattgagcagtttgtaaacagtccttttgtaggatctgcaaagggatatttctgggcccattgagacctatggtgaaagaagaaatatcttcacttaaaaactagacagaagcattctgagaaactttttagtgatgtgtgctttcatctcacaggtttgaactttctttcgattgagcagtttggaaacagtgtttttgtagaatctgcaaaggatattttgagcgctttgacgcctatggtgagaaaggacatatcttcacatgaaatctaaacagaagctttctgagaaacttcttttttatgagttcatacatctcacagaggtgaaactttcttttcattgagcagtttggaaacagtctttttgtacagtctgcaaaggaaatttctgcgaagttggaggcctatggtgaaaaagaaatatcttcagataaaatgtagacagaagtattctgagaaaattttttgtgatgtatctattcatctcacagatttgaatttttcttttgatggagcagtctggaaacagtctttttgtagtatctgcagagggatgtgtgaaagcagtttaaggcctgtggtgaaaaaggaaatatcttcacataaaaactaggtagaagcattctgagaaacttctttatgttctgtgcattcatctcaaagagttgaacctgtctttggattgagcagtttggaaattgtcgttttgtagaatctgtgaaaggatatttctgagcccattgaggcctatggatgaagtaggaaatatcttcatataaaaactagacagaggatttctgagaaacttctttgtgatatgtggtttcatctcacagagttgaaccattcttttggttgagcagttaggaaacagtatttttgtgggatctgcaaagggatatttctgttcccattgacgcctatggtgaaaaaggacatattttcacataaaaagtagacagaagctttctgataaacttcttagtgatgtgtgctttcatgtcacagatatgaaactttcttttgattgagcagtttggaaacagtctttttgtagaatctgcaaatggatatttggagcgctttgaggcctatggtgaaaaaggaaatacctttgcatgaaatataaacagaagctttctgagaaacttctttttgatgcatgcatacatcacacagagttgaaagtttcttttcattgagaagtttggatacagtctttttgtacaatctggaatgggatatttctgagaagttggaggcctatatcaaaaaagaaatatcttcacataaaaactagacagaagtattctgagaaacttctttgtgatgtatccattcatctcacagagttgaacctttcctttgatggagcagtttggaaacagtctttttgcagtatctgcagagggatatgtgagagcagtttaagggctatggtgaaaaaggaaatatcttcacataaaaactagacagaagcattctgagaaacttgtttgtgatgcgtgcattcaactcaaagaggtgaaactttctttggattgagcagtttggaaatagtccttttgcagaatctgcaaagggatatttctcagtccattgaggcctatggtgaaataggaaataacttctcataaaaaccagacagaacgtttctgagaaacttctttgagatatgtgctttcatctcacagagttgaacctttattttggttcagaagtttggaaacagtctttgtgtagaatctgcaaagggctatttttgagcaccttctggactatggtgaaacataaaatatcttcacataaaaactagacaggagctttctgtaagaaacttctttatgatgtgttctttcatctcacagagttgtaactttcctttgattgagcagtttggaaacactctttatggggaatctgcaagtggatatttggagtcctttgtggcctatagtggaaaacgaaatatcttcacataaaaactagacagaatcattctgagaaacttctttgtgatgtgcacattcatcacaaagagttgaacatttctttcgattcagcagtttggaaacagtcctttcgtagaatctgtgaagggatatttctcagcccattgacgcctatggatgaaataggaaacattctcacataaaaactagacagaaaatttctgagaaacttccttatgatatgtggtttcatctcacagagttgaaccattcttttggttgagcagtttggaaacacattttttgtagaatctgcaagtggatatttggagcacattgaggcctatggtggaaaacggaatattttcacataaaaattagacagaagcattctgagaaactactttgtgatgtgtgcattcaacccacagagttcaacctttcttttgattcagcagttttgaaacactctttttgtaaaatctgacagtggatttttggagtgctttgaggcctacggtggaaaaggaaatatcttcacataaatagtacacagaagcattctgagaaacttctttgtgatgtgtgcatttaactcaaagagtgcagtccttctttagattgagcagttttgaaagactccttttgcagaatctgcaagtggatgtttggagcgctatgtggccttaagtggaaaaggcaatatcttcacataaaaactagacaacagcattctgagaaacttctttgtcatgtgtgcattcatctcacagagttgaagctttcttttgattgagcagttttgaaacactctttttgtagaatctccaattggatacttggagtgttttgaggcctatggtagaaaagtaaatattttcacgtgaaaactacacagaagcattctgagaaattggtttgtgatgtgtgcattcaacacacagagttgaacctttcttttgattgagtagttttgaaacacactttttttaggatctgcaagtggatatttgcaatgctttgtggcctaatgcggaaaaggatatattttcacataaaaactacggagaagcattctgagaaacttctttgtgatgtgtgcattcaactcacagagttgaacctttcttttgtttgagcagttttgaaacactatttttgtaaaatctgcaagtggatacttggcgcgctttgcggcctatggtggaaaagcaaatatcttcacataaaaactagagagaagcattctgacaaagttctttgtgttgtgtgtgttcaactcacagatttgagtctttcttttgattgagcagttttgaaacactctttttttagaatctgcaagtggatatttcgagtgttttgcagcctctgttggaaaaggaaatatcttcacataaactagacagaagcaatctgagaaacttctttgtgatgtgtgcattcatctcacagagttgaaactttcttttgattgtgaagttttcaaatactctttttgtagaatctgcaagtggatatttggaggcctttgtgacctacaggggaaaaagaaatatcttcacataaaaactagacagannnnnnnnnnnnnnnnnnnnnnnnnnnnnnnnnnnnnnnnnnnnnnnnnnnnnnnnnnnnnnnnnnnnnnnnnnnnnnnnnnnnnnnnnnnnnnnnnnnnaacatgatgagaaactgctttgtgatgcgtgcattcatcaccagtagttgagtttctcttttgattgaacagttttgaaacactctttctgaagaatctgaaagggatatttggagcgctttgcagcctatggtgaaaaaggaaatatcttcacataaaagctagacagaagcattctaagaaagtgctttgtgacgtgtgcattcatctcacagtgttgaagctttcttttgattgagcagttttgaaacactcttattgtagaatctgcaagtggatatttggagagtatgaggccactggtggaaaagcaaatatcttcacatcaaaactagacagaatcattataagtaatctctttgagatgcgtgcattcaactcacagagttggacatttcctttgattgagcagtgtggaaacagtctttttgcagtatctgcaaacggatatttggagcactttcaggcctatagtaggaaaggaaatatcttcacataaaaactacacagaaaattactgagaaacttcttaatgatgtgtgcattcatctcacagagttgaaactttcttttgattgagcagtttggaaacactcttttagtagaaactgcaaggggatatttggagagttttgtggtctatggtagaaaaggatatatcttcacataaaaatagaagcattctgaggaacttcatgatgtgtgcattcgtctcaaggagttgaacttttcttttgattgagcagctttgaataactctttctgcagaatctgcaagttgatatttggagtgctttgtggcctatagtagaaaaggaaatatctttacataaaactagacagaagcattctgagaaaattttttgtgatgtgtgcattcaactcacagagttgaacctttcttttgatcgaggagtttggaagcagtctttttgtaatatctacaaatggatatttgcatcactttacttcatggaatggaaaaggaaacatcttaacataaaaactagacaaaagcattctgagaaacttctttgtgacgtgtgcattcaactcatggagttcaacctttcttttgattcagcagtttggaaacagtctttttacagtatctgcaaatggctatttggagagcattgacgcctatggtggaaaaggaaatctcttctcataaaaactagacagcagcattctgagaaacttatttgtgatctgtgcattcatctcacagagttgaacctttcttttgattcagcagttttgaaactgtcgttttgtagaatctgcaaaggaatatttgtgagcccattgaggcttctggggtgataggaaatatcttcacattaaaactagacagatactttcggagaaactattttgtcatgtgtgacttctactcacagggttgaaactttctcttgattgagcagtttggaaacagtctttttgtagaatctgcaaattgatatttggagtgcttttggcctacgttgaaaaacgaaatatcttcccataaaaagtaggcagaagttttggagaaacttattttgatgtgtgcattcatctcacacagttgaaattttcttttgattgagcagtgtggatacactcgttttgtagagtctgcaagtggatatttggagcactttgtggcctatagtgaaaaaggaaatatcttcacataaaaactagatagaagaattctgagaaacttcctttgaatgggcgcattcatctcacactgttgaacttttttttttgattgatcaccgtctaaacagtcattttgtagaatatgcaaaggaatatttgtgagcccattgatgcctctggggaaacaggaaatatcttcacataaaaacgagacagaatctttctcagaaacttctttgtgatgtgtgcattcatctcactgagttgaactttatttttattgagcagtttggaaacagtctttttctagtatctgcaaatggatattttaagcgctctgaggcctacggtgaaaaaggaaatatcttcaatataaatcagacagaagcattcatagaaacttctttgtgaggtgtgcattcatctcacagattagaacttttcttttgatttagcagttttgaaacactctttttgtagaatctgcaatgtatgtttgaagcgcatgaggaatatggtggaaaaggaatcttcttcacataaaaacgagacagaagcattctgagaaacttctctgtgatggatgcattcatttcccagagttaaacctttcctgtgattgagcggtttggaaacagtagttttttacaatctgcagaaggatacttgtgagccgattgaggtctatggggtgataagaaatatgttcacataaaaactagatagaaagtttctgagaaacttctttgtgatatttgcttttatctcatagagttgaaactttctttttattgagcagtttgggaacagtctttttgtagtatctgcaaatggatattaccagggctttgaggcctatggtgaaaaaggaaatatcttcacataaaaacaaggcagaagcattctgagaaacttctttttgatgtctgcattcatctcacagagttgaacctttcttttgattgagcagttttgaaacgctctatttgtagtgtctgcaagtggatatttggaacgctttgaggcctatagtggaaaaggaaatatcttcacataaaaaaccagaaagaaagaattctgagaaacttcctaggaaggtttattttcgtctcacactgttaaacccgtcttttgattgagcagcttcgatacagtcttttagtagaatatgaaagggaatatttgagagcccattgaggcctctggggaaataagaaatatcttcacctaaaaacaagacaaaactttctgagcaacttccttgtgatgtgtgcatttatcacacgcagttgaactttcttttgattgagcagtttggaaacagtcatttgtattatctataaatggatatttggagtgtaatgaggcctatggtgaaaaaggaaatatcttcacataaaaatcagatggaagcattcttagaaactcctttgtgttgtgttcattcatctcacagacttcaaactttctaatgattgagcagttttgaaactctctttttgtagaatctgccagtggatatttggagcgctctgtggccaatagtggataaggaaatatcttcataaaaaaaataaacagaagcactttaagaaagttctctgtgttgtatgcagtcatatctcagacatgaaactttctttggtacagcagttttaaaacactctttttggagattctgaaagtagatatttggagagacttgaggactacggtggaaaaggaaatatcttcacaaaaaaactagacagacaaaaaagaaacattctgagaagcttctttgtgatgtgtgcgtccatctcgaagagttgaacctttcttttgattgcgcatttttgaggcactctttttgtagaatcttcaagtggatatttggagggtttgtggcctgtggtggaaaagcaaatatattcacataaaaactagatagaagcattctgagagcttctttgtgatgtgctcattcaactcacagagttgagcttttcttttgattgagcagtttggaaacagtctttttgtagaatctgcaggtggatatttggagcgcattacggcctatagtggaaaaggaaatatattcacataaaaactagacagaagcattctgagaaacttctttgtgatgtgctcattcaactcacagagttgaacttttcttttgtttgagcagtttgcaatcagtctttttgtagaatctgcaagtggatattaggagtgcattacggcctatagtggaaaatgaaataacttcacataaaaaatagacagaaacgttatgagaaactgctttgtgatgcttgcattcatcaccagagttgagtttctcttttgattgaacagttttgaaacactctttctgtagaatctgaaagggatatttggagcgctttgcagcctatggtgaaaaagcaaatatcttcacataaaagctagacagaagcattctaagaaagtgctttgtgacgtgtgcattcatctcacagtgttgaacctttcttttgattgagcacttttgaaacactcttattgtagaatctgcaagtggatatttcgagagtttgaggccactggtggaaaagcaaatatcttcacatcaaaactagacaggatcattataagtaatctctttgagatgcgtgcattcaactcacagagttggacgtttcctttgattgagcagtttggaaacagtctttttgcagtatctgcaagcggatatttggagcactttcaggcctatagtaggaaaggaaatatcttcacctaaaaactagacagaaaattactgagaaacttcttaatgatgtgtgcattcatctcacagagttgaaacttcttttgattgagccgtttggaaactctcttttagtagaaactgcaaggggatatttggagcgttttgtggtctatggtagaaaaggctatatcttcacataaaaatagaagcattctgaggaacttcatgatgtgtgcattcatcacaaagagttgaacttttcttttgattgagcagctttgaaaaactctttctgcagaatctgcaagttgatatttggagtgctttgtggcctatagtagaaaaggaaatatctttacataaaactagacagaagcattctgagaaacttctttgtgatgtgtgcattcatctcacagagttgaatctttcttttgtttgagcagttttgaaactctctttttgtagaatcttcaagtggatattttcagcgctttgaggcctatgttggaaaagaaaatatcttcacataaaaactagtcagaagcattctgagaaacttctttgtgacgtgtgcattcaactcatggagttcaacctttcttttgattcagcagtttggaaacagtctttttacagtatctgcaaatggatatttggagagctttgaggcctatggtggaaaaggaaatctcttcccataaaaactagacagcaagcattctgagaaacttctgcctgatgggtgtattcacttcacggagttgaacctttccttgtattgaacagtttggaaacaatcgtttcgtagaatctgcagagggatatttttgagcccattgagacgtatggggtgataggaaatatcttcacataaaaactagacagatactttctgagaaactattttgtcatgtgtgacttctactcactgggttgaaactttctcttgattgagcagtttggaaacagtctttttgtagaatctgcaaattgatatttggagtgcttttggcctacgttgtaaaacgaaatatcttcccatataaagtaggcagaagttttggagaaatttattttgatgtgtgcattcatctcacacagttgaaattttcttttgattgagcagtgtggatacactcgttttgtagagtctgcaagtggatatttggagcactttgcggcctatagtgaaaaaggaaatatcttcacataaaaactagataaaagaattctgagaaacttcctttgaatgggcgcattcatctcacactgttgaactctttttttgattgagcaccttctaaacagtcattttgtagaatatgcaaaggaatatttgtgagcccattgatgcctctggggaaacaggaaatatcttcacataaaaacgagacagaatctttctcagaaacgtcttggtgatgtgtgcattcatctcactgagttgaactttattttgattgagcagtttggaaacagtcttttctactatctgcaaatggatatttgaagcactctgaggcctacggtgaaaaaggaaatatcttcaatataaatcagacagaagcattcatagaaacttctttgtgatgtgtgcattcatctcaccgactagaacctttcttttgattgagcagttttgaaacactcttttagcggaatctgcaagtgtttatttggagcgcatgaggaatatggtggaaaaggaatattcttcacatggaaacgagacggaagcattctgagaaacttctctgtgatggatgcattcatttcacagagttaaacctttcctgtgattgaacggtttggaaacagtagttttttacactctgcagaaggatacttgtgagctgattgaggtctatggggagataagaaatatgttcacataaaaactagatagaaagattctgagaaacttctttgtgatatttgcttttatctcatagagttgaaactttctttttattgagcagtttgggaacagtctttttgtagtatctgcaaatggatattaccagtgctttgaggcctatggtgaaaaaggaaatatcttcacataaaaacaaggcagaagcattctgagaaacttctttttgatgtctgcattcatctcacagagttgaacctttcttttgattgagcagtttagaaacgctctatttgtagtatctgcaagtggatatttggaacgctttgaggcctatagtggaaaaggaaatatcttcacataaaaacctagaaagaagaattctgagaaacttcctaggaatgtgtactttcttctcacactgttgaacctttcttttgattgagcagcttcgatacagtcatttagtagaatctgaaagagaatatttgagagcccattgaggcctcttgggaaataagaaatatcttcacctaaaaactagacaaaaattttctgagaaacacccttgtgatgtgtgcattcatcatacacagttgaactttcttttgattgagcagtttggatacagtcatttgtactatctgtaaatggatatttggagtgtactgaggcctatggtgaaaaaggaaatatcctcacataaaattcagatggaagcattcttagaaactcctttgtgatgtgtgcactcatctcacagacttcaaactttctattgattgagcagttttgaaacactctttttgtagaatctgccagtggatatttggagcgctactgtggcccatagtggaaaaggaaatatcttcataaaaaaaataaacagaagcaccttgagaaagttctctgtgttgtatgcagtcatatctcagacatgaaactttctttggtacagcagttttaaaacactctttttggagattctgaaagtaggtatttggagagacttgaggactacggtggaaaaggaaatatcttcacaaaaaaagtagacagaagcattctgagaagcttctttgtgatatgtgcatccatctcaaagagttgaacctttcttttgattgagcatttttgaagcactctttttgtagaatcttcaagtggatatttggaatgctttgtggcctgtggtggaaaaggaaatatcttcacataaaaactagacagaagcattctgagaaacttctttgtgatgtgctcattcaactcacagagttgagcttttcttttgattgagcagtttggaaacagtctttttgtagaatctgcaagtggatatttggagcgcatgacgacctatagtggaaaaggaaatatattcacataaaaactagacagaagcattctgagaaacttctttgtgatgtgctcattcaactcacagagttgaacttttcttttgtttgagcagtttgcaaacagtctttttgtagaatctgcaagtggatattaggagtgtattacggcctataatggagaatgaaatatcttcacataaaaactagacagaaacattatgagaaactgctttgtgatgcgtgcattcatcaccagagttgagtttctcttttgattgaacagttttgaaacattctttctgtagaatctgaaagggatatttgcagcgctttgcagcctatggtgaaaaaggaaatatcttcacataaaagctagacagaagcattctgggaaaattctttgtgatgtgtgcattcaactaacactgttgaacccttcttttgattgagcaattttgaaacactctttttgtagaatctgcaagtgtatatttggagtgctttgcagactacagtttaaaagggaatatcttcacctaaaaactagacagaatcattataagtaatctctttgagatgcatgcattcaactcacagagttggacatttcctttgattgagcagtgtggaaacagtctttttgcagtatctgcaaacggatatttgcagcactttcaggcctatagtaggaaaggaaatatcttcacataaaaactagacagaaaattactgagacacttcttaatgatgtgtgcattcatctcacagagttgaaactttcttttgattgagccgtttggaaacactcttttagtagaaactgcaaggggatatttggagcgttttgtggtctatggtagaaaaggatatatcttcacataaaaatagaagcattctgaggaacttcatgatgtgtgcattcatctcaaagagttgaacttgtcttttgactgagcagctttgaaaaactctttctgcagaatctgcaagttgatatttggagtgctttgtggcctatagtagaaaaggaaatatctttacataaaactagacagaagcattcttagaaactactttgtgaggagtgcattcatctcacagacttcaacctttcttttgattgagcagttttgaaacactctttttgcaggatctgcaagtgtatatttgaagcgctttgaggcctgtggtggaaaaggaaacatcttcacataaaaactagacacaagctttctgagaaacttctttgtgatgtgtgcattcaactcatgtagttgaacctttcttttgattcagcagtttggaaacagtctttttgtagtatctgcaaatggatatttggagagctttgaggcctatggtggaaaaggaaatatcttcacataaaaactagacagaagcattctgagaaacttatttgtgatctgtgcattcatctcacagagttgaacctttcttttgattcagcagttttgaaactgtcgttttgtagaatctgcaaaggaatatttgtgagcccattgaggcttctggggtaataggaaatatcttcacataaaaactagacagatactttctgagaaactattttgtcatgtgtgacttctactcaccgggttgaaacattctgttgattgagcagtttggaaacagtctttttgtagaatctgcaaattgatatttggagtgcttttggcctacgttgaaaaacgaaatatcttcccataaaaagtaggcagaaattttggagaaatttattttgatgtgtgcattcatctcacacagttgaaattttcttttgattgagcagtgtggatacactcgttttgtagagtctgcaagtggatatttggagcactttgtggcctatagtgaaaaaggaaatatcttcacataaaaactagatagaagaattctgagaaacttcctttgaatgggcgcattcatctcacactgttgaacttcttttttgattgagcaccttctaaacagtcattttgtagaatatgcaaaggaatatttgtgagcccattgatgcctctggggaaacaggaaatatcttcacataaaaacgagacagaatctttctcagaaacgtcttggtgatgtgtgcattcatctcactgagttgaactttattttgattgagcagtttggaaacagtcttttctagtatctgcaaatggatattttaaacactctgaggcctacggtgaaaaaggaaatatcttcaatataaatcagacagaagcattcatagaaacttctttgtgatgtgtgcattcatctcaccgactagaacctttcttttgattgagcagttttgaaacactcttttagcggaatctgcaagtgtttatttggagcgcatgaggaatatggtggaaaaggaatcttcttcacatgaaaacggacggaagcattctgagaaacttctctgtgatggatgcattcatttcacagagttaaacctttcctgtgactgagcggtttggaaacagtagttttttacaatctgcagaaggatacttgtgagccgattgaggtctatggggtgataagaaatatgttcacataaaaactagatagaaaatttatgagaaacttctttgtgatatttgctttcatctcacagagttgaaactttcttttgattgagcagtttgggaacagtctttttgtagtatctgcaaatggatattaccagtgctttgagacctatggtgaaaaaggaaatatcttcccataaatacaaggcagaagaattctgagaaacttctttttgatgtctgcattcatctcacagagttgaacctttcttttgattgagcagttttgaaacgctctatttgtagtatctgcaagtggatatttggaacgctttgaggcctatagtggaaaaggaaatatcttcacataaaaaactagaaagaagaattctgagaaacttcctaggaatgtgtgctttcttctcacactgttgaacctttcttttgattgagcagcttcgatacagtcatttagtagaatctgaaagagaatatttgagagcccattgaggcctcttgggaaataagaaatatcttcatctaaaaactagacaaaaactttctgagaaacacccttgtgatgtgtgcattcatcatacacagttgaactttcttttgattgagcagtttggatacagtcatttgtattatctgtaaatggatatttggaatgtactgacgcctatggtgaaaaaggaaatatcctcacataaaattcagatggaagcattcttagaaactcctttgtgatgtgtacattcatctcacagacttcaaactttctattgattgagcagtgttgaaacactctttttgtagaatctgccagtggatatttggagcgctctgtggccaatagtggaaaaggaaatatcttcatcaaaaaaataaacagaagcactttgagaaacttctctgtgttgtatgcagtcatatctcagacatgaaactttctttggtacagcagttttaaaacactctttttggagattctgaaagtagatatttggagagacttgaggactacggtggaaaaggaaatatcttcaccaaaaaactagacagaaacattctgagaagcttctttgtgatgtgtgcatccatctcgaagagttgaacctttcttttgattgagcatttttgaagcactctttttgtagaatcttcaagtggatatttggagtgtttgtggcctgtggtggaaaaggaaatatattcacataaaaactagatagaagcattctgagaaacttctttgtgatgtgctcattcaactcacagagttgagcttttcttttgattgagcagtttggaaacagtctttttgtagaatctgcaagtggatatttggagcgcatgatggcctatagtggaaaaggaaatatattcacataaaaactagacagaagcatgctgagaaacttctttgtgatgcgtgcattcaactaaaaaagttgaacatttcttttgattgagtagtttggaaacagtctttttgtagaatctgcaagtggatatttggagtgctttacggcctatagtggaaaacgaaataccttcacataaaaactagacagaaacattatgagaaactgctttgtgatgcgtgcattcatcaccagagttgaatttctcttttgattgatcagttttgaaacactctttctgtagaatctgaaagggatatttggagcgctttgcagcctatggtgaaaaaggaaatatcttcacataaaagctagacagaagcattctaagaaagtgctttgtgacgtgtgcattcatctcacagtgttgaacctttcttttgattgagcagttttgaaacactcttattgtagaatctgcaagtggatatttggagagtttgaggtcactggtggaaaagcaaatatcttcacatcaaaactagacagaatcattataagtaatctctttgagatgcagtgcattcaactcacagagttggaccgtttcctttgattgagcagtttggaaacagtctttttgcagtatctgcaagcggatatttggagcactttcaggcctatagtaggaaaggaaatatcttcacataaaaactagacagaaaattactgagaaacttctttatgatgtgtgcattcatctcacagagttgaaactttcttttgattgagcagtttggaaacactcttttagtagaaactgcaaggggatatttggagcgttttgtggtctatggcagaaaaggctatatcttcacataaaaatagaagcattctgaggaacttcatgatgtgtgcattaatctcaaagagttgaacttttcttttgattgagcagctttgaaaatctctttctgcagaatctgcaagttgatatttggagtgctttgtggcctatagtagaaaaggaaatatctttacataaaactagacagaagcattctcagaaacttctttgtgatgtgtgcattcatctcacagacttcaaactttctattgattgagcagttttgaaacactctttttgcagtatctgcaagtgtatatttgaagtgctttgaggcttctggtggaaaaggaagcatcttcacataaaaactagacacaagcattctgagaaacttctttgtgacgtgtgcattcaactcatggagttcaacctttcttttgattcagcagtttggaaacagtctttttacagtatctgcagatggatatttggagagctttgaggcctatggtggaaaaggaaatctcttcccataaaaactagacagcagcattctgagaaacttatttgtgatctgtgcattcatctcacggagttgaacctttcttttgattcagcagttttgaaactgtcgttttgtagaatctgcaaaggaatatttgtgagcccatggaggcttctggggtgataggaaatatcttcacataaaaactagacagatactttctgagaaactattttgtcatgtgtgacttctactcaccaggttgaaactttctcttgattgagcagtttggaaacagtctttttgtagaatctgcaaattgatatttggagtgcttctggcctacgttgaaaaacgaaatatcttcccataaaaagtaggcagaagttttggagaaatttattttgatgtgtgcattcatctcacacagttgaaattttcttttgattgagcagtgtggatacactcgttttgtagcgtctgcaagtggatatttggagcactttgtggcctacagtgaaaaaggaaatatcttcacataaaaactagatagaagaattctgagaaacttcctttgaatgggcgcattcatctcacactgttgaacttttttttttgattgagcaccttctaaacagtcattttgtagaatatgcaaaggaatatttgtgagcccattgatgcctctggggaaacaggaaatatcttcacataaaaacgagacagaaatctttctcagaaacgtcttggtgatgtgtgcattcatctcactgagttgaactttattttgattgagcagtttggaaacagtcttttctagtatctgcaaatggatattttaagcactctgaggcctacagtgaaaaaggaaatatcttcaatataaatcagacagaagcattcatagaaacttctttgggatgtgtgcattcatctcaccgactagaacctttcttttgattgagcagttttgaaacactcttttagcggaatctgcaagtgtttatttggaacgcatgaggaatatggtggaaaaggaatcttcttcacatgaaaacgagacggaaacattctgagaaacttttctgtgatgggcgcattcatttcacaaagttaaacccttcctgtgattgaatggtttggaaacatttgttttgtataatctgcagaaggatatttttgagctgattgaggcctatggggcgataggaaatatgttcacataaaaactagacagaaagtttctgagaaacttctttgtgatatttgcttttatctcatagagttgaaactttatttttattgagcagtttgggaacagtctttttgtagtatctgcaaatggatattaccagtgctttgaggcctattttgaaaaaggaaatatcttcacataaaaacaaggcagaagcattctgagaaacttctttttgatgtctgcattcatctcacagagttgaacatttcttttgattgagcagttttgaaacgctctatttgtagtatctgcaagtggatatttggaacgctttgaggcctatagtggaaaaggaaatatcttcacataaaaaactagaaagaagaattctgagaaacttcctaggaagctgtattttcgtctcacactgttaaacccgtcttttgattgagcagcttcgatacagtcatttagtagaatatgaaagggaatatttgagagcccattgaggcctctggggaaataagaaatatcttcacctaaaaactagacaaaatctttctgagaaacccccttgtgatgtgtgcattcatcatgcacagttgaaatttcttttgattgagcagtttggatacagtcatttgtattttctgtaaatggatatttggagtgtattgaggcctatggtgaaaaaggaaatatcctcacataaaattcagatggaagcattcttagaaactcctatgtgatgtgtgcattcatctcacagacttcaaactttctattgattgagcagttttgaaacactctttttgtagaatctgccagtggatatttggagcgttctgttgcccatagtggaaaaggaaatatcttcataaaaaaaataaacagaagcactttgagaaagttttctgtgttgtatgcagtcataactcagacatgaaactttctttggtacagcagttttaaaacactctttttggagattctgaaagtagatatttggagagacttgaggactacggtggaaaaggaaatatcttcacaaaaaaactagacagaaacattctgagaagcttctttgtgatgtgtgcgtccatttcgaagagttgaacctttcttttgattgagcatttttgaagcactctttttgtagaatcttcaagtggatatttggagggtttgtggcctgtggtggaaaaggaaatatattcacataaaaactagatagaagcattctgagaaacttctttgtgatgtgctcatacaactcacagagttgagcttttcttttgattgagcagtttggaaacagtctttttgtagaatctgcaagtggatattaggagtgcattacggcctatagtggaaaaggaaatatattcacataaaaactagacagaagcatgctgagaaacttctttgtgatgtgctcattcaactcacagagttgaacttttcttttgtttgagcagtttgcaaacagtctttctgtagaatctgcaagtggatattaggagtgcattacggcctatagtggaaaatgaaatatcttcacataaaaactagacagaaatattatgagaaactgctttgtgatgcgtgcattcatcaccagagttgagtttctcttttgattgaacagttttgaaactctctttctgtagaatctgaaagggatatttggagcgctttgcagcctatggtgaaaaaggaaatatcttcacataaaagctagacagatgcattctaagaaagtgctttgtgacgtgtgcattcatctcacagtgttgaagctttcttttgattgagcagttttgaaacactcttattgtagaatctgcaagtggatatttggagagtttgaggtcactggtggaaaagcaaatatcttcacatcaaaactagacagaatcattataagtaatctctttgagatgcgtgcattgaactcacagagttggacatttcctttgattgagcagtgtggaaacagtctttttgcagtatctgcaaacggatatttggagcactttcaggcctatagtaggaaaggaaatatcttcacataaaaactagacagaaaattactgagaaacttcttaatgatgtgtgcattcatctcacagagttgaaacttcttttgattgagcagtttggaaacactcttttagtagaaactgcaaggggatatttggagcgttttgtggtctatggtagaaaaggatatgtcttcacataaaaatagaagcattctgaggaacttcttcatgacgtgtgcattcatctcaaagagttgaacttttcttttgattgagcagctttgaaaaactctttctgcagaatctgcaagttgatatttggagtactttgcggcctatagtagaaaaggaaatatcttcacataaaactagacagaagcattctgagaaacttctttgtgatgtgtgcattcatctcacagagttgaatctttcttttgtttgagcagttttgaaactctctttctgtagaatcttcaagtggatatttttagcgctttgaggcctatggtggaaaagaaaatatcttcacataaaaactagtcagaagaattctgagaaacttctttgtgacgtgtgcattcaactcatggagttcaacctttcttttgattcagcagtttggaaacagtctttttacagtatctgcaaatggctatttggagagctttgaggcctatggtggaaaaggaaatctcttcccataaaaactagacagcagcattctgagaaacttatttgtgatctgtgcattcatctcacagagttgaacctttcttttgattcagcagttttgaaactgtcgttttgtagaatctgcaaaggaatatttgtgagcccattgaggcttctggggtgataagaaatatcttcacataaaaactagacagatactttctgagaaactattttgtcatgtgtgacttctactcaccaggttgaaactttctcttgattgagcagtttggaaacagtctttttgtagaatctgcaaattgatatttggagtgcttttggcctacgttgaaaaacgaaatatcttcccataaaaagtaggcagaagttttggagaaatttattttgatgtgtgcattcatctcacacagttgaaattttcttttgattgagcagtgtggatacactcgttttgtagagtctgcaagtggatatttggagcactttgtggcctacagtgaaaaaggaaatatcttcacataaaaactagatagaagaattctgagaaacttcctttgaatgtgcgcattcatctcacattgttgaacttttttttttgattgagcaccttctaaacagtcattttgtagaatatgcaaaggaatatttgtgagcccattgatgcctctggggaaataggaaatatcttcacataaaaacgagacagaatctttctcagaaacgtcttggtgatgtgtgcattcatctcactgagttgaactttattttgattgagcagtttggaaagtgtcttttctagtatctgcaaatggatattttaagcactctgaagcctacggtgaaaaaggaaatatcttcaatataaatcagacagaagcattcatagaaacttctttgtgatgtgtgcattcgtctcaccgactagaacctttcttttgattgagcagttttgaaacactcttttagcagaatctgcaagtgtttatttggagtgcatgaggaatatggtggaaaaggaatcttcttcacataaaaacgagacagaagcattctgagaaacttctctgtgatgggtgcattcatttcacagagttaaacctttcctgtgattgagcggtttggaaacagtcgttttttataatctgcagaaggatacttgtgagccgattgaggtctatggggtgataagaaatatgttcacataaaaactagatagaaagtttctgagaaacttctttgtgatatttgcttttatctcctagagttgaaactttctttttattgagcagtttggggacagtctttttgtagtatctgcaaatggatattaccagtgctttgaggcctatggtgaaaaaggaaatatcttcacataaaaacaaggcggaagcattctgagaaacttctttttgatgtctgcattcatctcacagagttgaacctttcttttgattgagcagttttgaaaggctctatttgtaggatctgcaagtggatatttggaacgctttgaggcctatagtggaaaacgaaatatcttcacataaaaacctagaaggaagaattctgagaaacttcctaggaaggtgtattttcgtctcacactgttaaacccgtcttttgattgagcagcttcgatacagtcatttagtagaatatgaaagggaatatttgagatcccattgaggcctctggggaaataagaaatatcttcacctaaaaacaagacaaaaactttctgagaaacacccttgtgatgtgtgcattcatcatacacagttgaactttcttttgattgagcagtttggatacagtcatttgtattatctgtaaatggatatttggagtgtactgaggcctatggtgaaaaaggaaatatcctcacataaaattcagatggaagcattcttagaaactcctttgtgatgtgtacattcatctcacacacttcaaactttctactgattgagcagttttgaaacactctttttgtagaatctgccagtggatatttggagcgctctgtggcccatagtggaaaaggaaatatcttcataagaaaaataaacagaagcactttgagaaagttctctgtgttgtatgcagtcataactcagacatgaaactttctttggtacagcagttttaaaacactctttatggagattctgaaagtagatatttggagagacttgaggactacggtggaaaaggaaatatcttcacaaaaaaactagacagaaacattctgagaagcttctttgtgatgtgtgcatccatctcaaagcagttgaacctttcttttgattgagcatttttgaagcactctttttgtagaatcttcaagtggatatttggagtgtttgtggcctgtggtggaaaaggaaatatattcacataaaaactagatagaagcattctgagaaacttctttgtgatgtgctcattcatctcacagagttgaacttttcttttgattgagcagtttggaaacagtctttttgtagaatctgcaggtggatatttggagcgcattacggcctatagtggaaaaggaaatatattcacataaaaactagacagaagcattctgagaaacttatttgtgatgtgctcattcaactcacagatttaaacttttcttttgattgagcagtttggaaacagtctttttgtagtacctgcaaatggatatttggagtgctttggggcctgtggtggaaaaggaaatatatacacacaaaaactagacagataaatattatgagaaactgctctgtgatgcgtgcattcatcaccagggttgaacctttcttttgattgaacagttttgaaacactctttctgtagaatctgaaggggatatttggaacgccttgcggcctatggtgaaaaacgaaatatcttcacataaaaactagacagaagcattctaagaaagtgctttgtgacgtgtgcattcatctcacagtgttgaacctttctttgattgagcagttttgaaacactcttattgtagaatctgcaagtggatatttggagagtttgaggccactggtggaaaagcaaatatcttcacatcaaaactagacagaatcattatgagtaatctctttgagatgcgtgcattcaactcacagcatttggacatttcctttgattgagcagtttggaaacagtctttttgcagtatctgcaaacggatatttggagcactttcaggcctatagtaggaaaggaaatatcttcacataaaaactagacagaaaattactgagaaacttcttattgatgagtgcattcatctcacagagttgaaacttcttttgattgagcagtttggaaacactcttttagtagaaactgcaaggggatatttggagcgttttgtcgtctatggtagaaaaggctatatcttcacataaaaatagaagcattctgaggaacttcctgatgtgtgcattcatctcaaagagttgaacttttcttttgattgagcagctttgaaaaactctttctgcagaatctgcaagttgatatttggagtgctttgtggcctatagtagaaaaggaaatatctttacataaaaccagacagaagcattcttagaaacttctttgtgatgtgtacattcatctcacagacttcaacctttcttttgattgagcagttttgaaacactctttttgcaagatctgcaagtgtatatttgaagcactttgaggcctctggtggaaaaggaaacatcttcacataaaagctagacacaagcattctgagaaacgcctttgtgacgtgtgcattcaactcatggagttcaacctttcttttgattcagcagtttggaaacagtctttttacagtgtctgcaaatggatatttggagagctttgaggcctatggtggaaaaggaaatatcttcccataaaaactagacagcagcattctgagaaacttatttgtgatctgtgcattcatctcccagagttgaacctttcttttgattcagcagttttgaaactgtcgttttgtagaatctgcaaaggaatattgtgagcccattgaggcttctggggtgataggaaatatcttcacgtaaaaactagacagatactttctgagaaactattttgtcatgtgtgacttctactcaccgggttgaaactttctcttgattgagcagtttggaaacggtctttttgtagaatctgcaaattgatatttggagtgcttttggcctatgttgaaaaacaaaatatcttcccataaaaagtaggcagaagcttttggagaaatttctttgtgatgtgtgcattcatctcacacagttgaacttttcttttgattgagcagtgtggaaacactctttttgtagagtctgcaagtggatattttgagtgctttgtggcctatagtgaaaaaggaaatatcttcacataaaaactggacagaagaattctgagaaacttcctttgaatgggcgcattcatctcacactgttgaaatttttttttgattgagcaccttctaaacagtcattttgtagaatgtgcaaaggaatatttgtgagcccattgatgcctctggggaaacaggaaatatcttcacataaaaacgagacagaatctttctcagaaacgtcttggtgatgtgtgcattcatctcactgagttgaactttattttgattgagcagtttggaaacagtcttttctagtatctgcaaatggatattttaagcactctgaggcctacggttaaaaaggaaatatcttcaatataaatcagacagaagcattcatagaaacttctttgtgatgtgtgcattcatctcaccgactagaacctttcttttgattgagcagttttgaaacactcttttagcggaatctgcaagtgtttatttggagcgcatgaggaatatggtggaaaaggaatcttcttcacatggaaacgagacggaagcattctgagaaacttctctgggatggatgcattcatttcacagagttaaacctttcctgtgattgagcggtttggaaacagtagttttttacaatctgcagaaggatacttgtgagccgattgaggtctatggggtgataagaaatatgttcacataaaaactagatagaaagtttctgagaaacttctttgtgatattagcttttatctcatagagttgaaactttctttttattgagcagtttgggaacagtctttttgtagtatctacaaatggatattaccagtgctttgaggcctatggtgaaaaaggaaatatcttcacataaaaacaaggcggaagcattctgagaaacttctttttgatgtctgcattcatctcacagagttgaacctttctttcgattgagcagttttgaaaggctctatttgtaggatctgcaagtggatatttggaacgctttgaggcctatagtggaaaaggaaatatcttcacataaaaacctagaaagaagaattctgagaaacttcccaggaaggtgtattttcgtctcacactgttaaacctttcttttgattgagcagattcgatacagtcgtttagtagaatatgaaagggaatatttgagagcccattgaggcctctggggaagtaagaaataacttcacctaaaaattagacaaaaactttctgagaaacttccttgtgatgtgtgtattcatcatacacaagttgaactttcttttgattgagcggtttggatacagtcatttgtattatctataaatggatatttggagcgtattgaggcctatggtgaaaaaggaaatatcctcacataaaattcagatggaagcattcttagaaactcctttgtgatgtgcacattcatctcacagacttcaaactttctattgattgagcagttttgaaacactctttttgtagaatctgccagtggatatttggagcgctctgtggcccatagtggaaaaggaaatatcttcataagaaaaataaacagaagcactttgagaaacttctctgtgttgtatgcagtcatatctcagacatgaaactttctttggtacagcagttttcaaacactctttttggagattctgaaagtagatatttggagagacttgaggactacggtggaaaaggaaatatcttcacaaaaaaactagacagaaacattctgagaagcttctttgtgatgtgtgcatccatctcaaagagttgaaactttcttttgattgagcatttttgaagcactctttttgtagaatcttcaagtggatatttggagtgtttgtggcctgtggtggaaaaggaaatatattcacttaaaaactagacagaagcattctgagaaacttctttctgatgtgctcattcaactcacagagttgagcttttcttttgattgagcagtttggaaacagtctttttgtagaaactgcaagtggatatttggagcgcattacggcctatagtggaaaaggaaatatattcacatagaaactagacagaagcattctgagaaacttctttgtgatgtgctcattcaactcacagagttgaacttttcttttgtttgagcagtttgcaaacagtcttttgtagaatctgcaagtggatattaggagtgcattacggcctatagtggaaaatgaaataacttcacataaaaaatagacagaaacatgatgagaaactactatgtgatgcgtgcattcataaccagagttgtgtttctcttttgattgaacagttttgaaacactctttctgttgaatctgaaagggatatttggagcgctttgcagcctatggtgaaaaaggaaatatcttcacataaaagctagacagaagcattctaagaaagtgctttgtgacgtgtgcattcatctcagagtgttgaacctttcttttgattgagcagttttgaaacactcttattgtagaatctgcaagtggatatttggagagtttgaggccactggtggaaaagcaaatatcttcacatcaaaactagacagaatcattataagtaatctctttgagatgcgtgcattcaactcacagagttggacatttcctttgattgagcagtttggaaacagtctttatgcagtatctgcaaacggatatttggagcactttcaggcctatagtaggaagggaaatatcttcacataaaaactagacagcaaattactgagacacttcttaatgatgtgtgcattcatctcacagcgttgaaactttcttttgattgagccgtttggaaacactcttttagtagaaactgcaaggggatatttggagcgttttgtggtctatggtagaaaaggatatgttcacataaaaatagaagcattctgaggaacttcctgatgtgtgcattcgtctcaaagagttgaacttttcttttgattgagcagctttgaaaaactctttctgcagtatctgcaagttgatatttggagtgctttgtggcctatagtagaaaaggaaatatctttacataaaactagacagaagcattctgaggaaacttctttgtgatgtgtgcattcatctcacagagttgaatctttcttttgtttgagcagttttgaaactctctttttgtagaatcttcaagtggatattttcagcgctttgaggcctacggtggaaaagaaaatatcttcacataaaaactagtcagaaccattctgagaaacttctttatgacgtgtgcattcaactcatggagttcaacctttcttttgattcagcagtttggaaacagtctttttacagtatctgcaaatggctatttggagagctttgaggcctatggtggaaaaggaaatctcttcccattaaaactagacagcagcattctgagaaacttatttgtgatctgtgcattaatctcacagagttgaacctttcttttgattcagcagttttgaaactgtcgttttgtagaatctgcaaaggaatatttgtgagaccattgaggcttctggggtgataggaaatatcttcacataaaaactagacagatactttctgagaaactattttgtcatgtgtgacttctactcactgggttgaaactttctcttgattgagcagtttggaaacagtctttttgtagaatctgcaaattgatatttggagtgcttttggcctacgttgaaaaacgaaatatcttcccataaaaagtaggcagaagttttggagaaatttattttgatgtgtgcattcatctcacacagttgaaatattcttttgattgtgcagtgtggatacactcgttttgtagagtctgcaagtggatatttggagcactttgtggcctatagtgaaaaaggaaatatcttcacataaaaactagatagaagaattctgagaaacttcctttgaatgggcgcattcatctcacactgttgaactttttttttgattgagcaccttctaaacagtcattttgtagaataggcaaaggaatgtttgtgagcccattgatgcctctggagaaacaggaaatatcttcacataaaaacgagacagaatctttctcagaaacgtcttggtgatgtgtgcattcatctcactgagttgaactttactttgattgagcagtttggaaacagtcttttctagtatctgcaaatggatattttaagcactctgaggcctacggtgaaaaaagaaatatcttcaatataaatcagacagaagcattcatagaaacttctttgtgatgtgtgcattcatctcactgactagaacctttcttttgattgagcagttttgaaacacttttatagcagaatctgcaagtgtttatttagagtgcatgaggaatatggtggaaaaggaatcttcttcacataaaaacgagacagaagcattctgagaaacttctctgtgatgggtgcattcatttcacagagtggaacctttcctgtgattgagtggtttggaaacagtcgttttttataatctgcagaaggatacttgtgagccattgaggtctatggggtgataagaaatatgttcacataaaaactagatagaaagtttctgagaaacttctttgtgatatttgcttttatctcctagagttgaaactttctttttattgagcagtttggggacagtctttttgtagtatctgcaaatggatattaccagtgctttgaggcctatggtggaaaaggaaatatcttcacataaaaacaaggcggaagcattctgagaaacttctttttgatgtatgcattcatctcacagagttgaacctttcttttgattgagcagttttgaaacgctctatttgtagtatctgcaagtggatatttggaacgctttgaggcctatagtggaaaaggaaatatcttcacataaaaaactagaaagaagaattctgagaaacttcctaggaaggtgtgttttcgtctcacactgttaaacccgtcttttgattgagcagcttcgatacagtcatttagtagaatatgaaagggaatatttgagagcccattgaggcctctggggaaataagaaatatcttcacctaaaaactagacaaaatctttctgagaaacagccttgtgatgtgtgccttcatcatacacagttgaactttcttttgattgagcagtttggatacagtcatttgtattatctgtaaatggatatttggagtgtactgaggcctatggtgaaaaaggaaatatcctcacataaaattcagatggaagcattcttagaaactcctttgtgatgtgtacattcatctcacagacttcaaactttctattgattgagcagttttgaaacaccctttttgtagaatctgccagtggatatttggagcactctgtggcccatagtggaaaaggaaatatcttcataagaaaaataaacagaagcactttgagaaacttctctgtgttgtatgcagtcatatctcagacatgaaactttctttggtacaggagttttaaaacactctttttggagattctgaaagtagatatttggagagacttgaggactacggtggaaaaggaaatatcttcacaagaaaactagacagaaacattctgagaagcttctttgtgttgtgtgcgtccatctcgaagagttgaacctttgttttgattgcgcatttttgaggcactctttttgtagaatcttcaagtggatatttggagggtttgtggcctgtggtggaaaagcaaatatattcacataaaaactagatagaagcattctgagaaacttctttgtgatgtgctcattcaactcacagagttgagcttttcttttgattgagcagtttggaaacagtctttctgtagaatctgcaagtggatatttggagcgcattacggcctatagtggaaaaggaaatatattcacataaaaactagacagaagcattctgagaaacttctttgtgatgtgctcattcaactcacagagttgagcttttcttttgattgagcagtttggaaacagtctttctgtagaatctgcaagtggatattaggagtgcattacggcctatagtggaaaatgaaatatcttcacataaaaactagacagaaacattatgagaaactgctttgtgatgcgtgcattcatcaccagagttgagtttctcttttgattgaacagttttgaaacactctttctgtagaatctgaaagggatatttggagcgctttgcagcctatggtgtaaaaggaaacatcttcccataaaagctagacagaagcattctaagaaagtgctttgtgacgcgtgcattcatctgacagtgttgaacctttcttttgattgagcagttttgaaacactcttattgtagaatctgcaagtggatatttggagagtttgaggccactggtggaaaagcaaatatcttcacatcaaaactagacagaatcattataagtaatctctttgagatgcgtgcattcaactcacagagttggacgtttcctttgattgagcagtttggaaacagtctttttgcggtatctgcaagcggatatttggagcactttcaggcctatagtaggaaaggaaatatcttcacataaaaactagacagaaaattactgagaaacttcgtaatgatgtgtgcattcatctcacagagttgaaactttcctgtgattgagcagtttggaaacactcttttagtagaaagtgcaaggggatatttggagggttttatggtctatggtagaaaaggttatcttcacataaaaatagaagcattctgaggaacttcctgatgtgtgcattcatctcaaagagttgaacttttcttttgattgagcagctttgaaaaactctttctgcagaatctgcaagttgatatttggaaagctttgtggcctatagtagaaaaggaaatatctttacataaaactagacagaagcattctgagaaacttctttgtgatgtgtgcattcatctcacagagttgaatctttcttttgtttgagcagttttgaaactctctttttgtagaatcttcaagtggatattttcagcgctttgaggcctacggtggaaaagaaaatatcttcacataaaaactagtcagaagcattctgagaaacttctttgtgacgtgtgcattcaactcatggagttcaacctttcttttcattcagcagtttggaaacagtctttttacagtatctgcaaatggctatttggagagctttgaggcctatggtggaaaaggaaatctcttcccataaaaactagacagcagcattctgagaaacttatttgtgatctgtgcattcatctcacagagttgaacctttcttttgattcagcagttttgaaactgtcgttttgtagaatctgcaaagggatatttgtgagcccattgaggcttctggggagataggaaatatcttcacataacaactagacagatactttctgagaaactattttgtcatgtgtgacttcaactcaccgggttgaaactttctcttgattgagcagtttgggaacagtctttttgtagaatctgcaaatgaatatttggagcacttttggcctatgttgaaaaatgaagtatctttccataaaaactaggcagaagttttggagaaatttattttgatgtgtgcattcatctcacacagttgaaattttcttttgattgagcagtgtggatacactcgttttgtagagtctgcaagtggatatttggagcactttctggcctatagtgaaaaaggaaatatcttcacataaaaactagatagaagaattctgagaaacttcctttgaatgggtgcattcatctcacactgttgaactttttttttgattgagcaccttctaaagagtcattttgtagaatctgcaaaggaatatttgtgagcccattgatgcctctggggaaacaggaaatatcttcacataaaaacgagacagaatctttctcagaaacgtcttggtgatgtgtgcattcatctcactgagttgaactttattttgattgagcagtttggaaacagtcttttctagtatctgcaaatgtatattttaagcactctgaggcctacggtgaaaaaggaaatatcttcaatataaatcagacagaagcattcatagaaacttctttgtgatgtgtgcattcatctcaccgactagaacctttcttttcattgagcagttttgaaacactcttttagcggaatctgcaagtgtttatttggagcgcatgaggaatatggtggaaaaggaatcttcttcacttgaaaacgagacggaaacattctaagaaacttctccgtgatggatgcattcatttcacagagttaaacctttcctgtgattgagcggtttggaaacagtagttttttacaatctgcagaaggatacttgtgagccgattgaggtctatggggtgataagaaatatgttcacataaaaactagatagaaagtttctgagaaactgctttgtgatattagcttttatctcatagagttgaaaatttctttttattgagcagtttgggaacagtctttttgtagtatctgcaaatggatattaccagtgctttgaggcgtatggtgaaaaaggaaatatcttcacataaaaacaaggcggaagcattctgagaaacttctttttgatgtctgcattcatctcacagagttgaacctttcttttgattgagcagttttgaaaggctctatttgtaggatctgcaagtggatatttggaacgctttgaggcctatagtggaaaaggaaatatcttcacataaaaacctagaaagaagaattctgagaaacttccgaggaaggtgtattttcgtctcacactgttaaacccgtcttttgattgagcagcttcgatacagtcatttaggagaatatgaaagggaatatttgagagcccattgaggcctctggggaaataagaaatatcttcacctaaaagctagacaaaaactttctgagaaacacccttctgatgtgtgcattcatcatacacagttgaacattcttttgattgagcagtttggatacagtcatttgtattatctgtaaatggatatttggagtgtattgaggcctatggtgaaaaaggaaatatcctcacataaaattcagatggaagcattcttagaaactcctttgtgatgtgtgcattcatctcacagacttcaaactttctattgattgagcagttttgaaacactctttttgtagaatctgcaagtcgatatttggagcgctctgtggcccatagtggaaaaggaaatatcttcataaaaaaaataaacagaagcactttgagaaacttctctgtgctgtatgcagtcatatctcagacatgaaactttctttgatacagcagttttaaaacactctttttggagattctgaaagtagatatttgagagacatgaggactatggtggaaaaggaaatatcttcacacaaaaactagacagaaacattctgagaagcttctttgtgatgtgtgcatccatctcaaagagttgaacctttcttttgattgaccatttttgaagcactctttttgtagaatcttcaagtggatatttggagtgtttgtggcctgaggtggaaaaggaaatatattcacataaaaactagatagaagcattctgagaaacttctttctgatgtgctcattcaactcacagagttgagcttttcttttgattgagcagtttggaaacagtctttttgtagaaactgcaagtggatatttggagcgcattacggcctatagtggaaaaggaaatatattcacataaaaactagacagaagcattctgagaaacttctttgtgatgtgctcattcaactcacagagttgaacttttcttttgtttgagcagtttgcaaacagtctttctgtagaatctgcaagtggatattaggagtgcattacggcctatagtggaaaatgaaatatcttcacataaaaaccagacaaaaacattatgagaaactgctttgtgatgcgtgcattcatcaccagtgttgagtttctcttttgattgaacagttttgaaacactctttctgtagaatctgaaagggatatttggagcgctttgcagcctatggtgaaaaaggaaatatcttcacataaaagctagacagaagcattctaagaaagtgctttgtgacgtgtgcattcacctcacagtgttgaacctttcttttgattgagcagttttgaaacactcttattgtagaatctgcaagtggatatttggagagtttgaggccactggtggaaaagcaaatatcttcacatcaaaactagacagaatcattataagtaatctctttgagatgcgtgcattcaactcacagagttggacatttcctttgattgagcagtttggaaacagtctttttgcagtatctgcaaacggatatttggagcactttcaggcctatagtaggaaattaaatatcttcacataaaaactagacagaaaattactgagaaacttcttaatgatgtgtgcattcatctcacagagttgaaactttcttttgattgagcagtttggaaacactcttttagtagaaactgcaaggggatatttggagcattttgtggtctatggtagaaaaggctatatcttcacataaaaatagaagcattttgaggaacttcatgatgtgtgcattcatctcaaagagttgaacttttcttttgattgagtagctttgaaaaactctttctgcagaatctgcaagttgatatttggagtgctttgtggcctatagtagaaaaggaaatatctttacttaaaactagacagaagcattctgagaaacttctttgtgatgtgtgcattcatctcacagagttgaatctttcttttgtttgagcagttttgaaactctctttctgtagaatcttcaagtggatatttttagtgctttgaggactatggtggaaaagaaaatatcttcacataaaaactagtcagaagcattctgagaaacttctttgtgacgtgtgcattcaactcatggagttcaacctttcttttgattcagcagtttggaaacagtctttttacagtatctgcagatggatatttggagagctttgaggcctatggtggaaaaggaaatatcttcccataaaaactagacagcagcattctgagaaacttatttgtgatctgcgcattcatctcacagagttgaacctttctcttgattcagcagttttgaaactgtcgttttgtagaatctgcaaaggaatatttgtgagcccattgaggcttctggggtgataggaaatatcttcacataaaaactagacagatactttctgagaaactattttgtcatgtgtgtcttctactcaccgggttgaaactttctgttgattgagcagtttggaaacagtctttttgtagaatctgcaaattgatatttggagtgcttttggcctacattgaaaaacgaaatatcttcccataaaaagtaggcagaagttttggagaaatttattttgatgtgtgcattcatctcacacagttgaaattttcttttgattgagcagtgtggatacactcgttttgcagagtctgcaagtggatatttggagcactttgtggcctatagtgaaaaaggaaatatcttcacataaaaactagatagaagaattctgagaaacttcctttgaatgggcgcattcatctcacactgttgaacttttttttttgattgagcaccttctaaacagtcattttgtagaatatgcaaaggaatatttgtgagcccattgatgcctctgcggaaacaggaaatatcttcacataaaaacgagacagaatctttctcagaaacgtcttggtgatgtgagcattcatctcactgagttgaactttattttgattgagcagtttggaaacagtcttttctagtatctgcaaatggatattttaagcactctgaggcctacggtgaaaaaggaaatatcttcaatataaatcagacagaaggattcatagaaacttctttgtgatgtgtgcattcatctcaccgactagaacctttcttttgattgagcagttttgaaacactcttttagcggaatctgcaagtgtttatttggagcgcatgaggaatatggtggaaaaggaatcttcttcacatagaaacgagatggaagcattctgagaaacttctctgtgatggatgcattcatttcacagagttaaacctttcctgtgattgagcggtttggaaacagtagttttttacaatctgcagaaggatacttgtgagccgattgaggtctatggggtgataagaaatatgttcacataaaaaatagatagaaagtttccgagaaacttctttgtgatatttgctttcatctcatagagttgaaactttctttttattgagctgtttgggaacagtctttttgtagtacctgcaaatggatattaccagtgctttgaggcctatggtgaaaaaggaaatatcttcacataaaaacaaggcagaagcattctgagaaacttctttttgatgtctgcattcatctcacagagttgaacctttcttttgattgtgcagttttgaaacgctctatttgtagtatctgcaagtggatatttggaacgctttgaggcctatagtggaaaaggaaatatcttcacataaaaacctagaaagaagaattctgagaaacttcctaggaatgtgtgctttcatctcacactgttgaacctttcttttgattgagcagctccgatatagtcgtttagtaaaatctgaaagagaatatttgagagcccattgcggcctctagggaaataggaagtatcttcacctaaaaactagacacaaactttctgagaaacttccttgtgatatgtgcattcgtcacacagagttgaacttccttttgattgggcagtttggaaacagtcatttgtattatctgtaaatggatatttggagtgtattgaggcctgtggtgaaaaacgaaatttcttcacataaaaatcacatggaagcattctcagaaactcccttgtgatgtgtgcactcatctcacagacttcaaactttctattgattgagcagttttgaaacactctttttgtagaatctgcaagtggatatttggagcgctctgtggcccatagtggaaaaggaaatatcttcataaaaaaaataaacagaagcactttgagaaacttctctgtgttgtatgcagtcatatctcagacatgaaactttctttggtacagcagttttaaaacactctttttggagattctgaaagtagataattggagagacttgaggactacggtggaaaaggaaatatcttcacaaaaatactagacagaaacattctgagaagcttctttgtgatgtgtgcgtccatctcgaagagttgaacctttcttttgattgagtatttttgaagcactctttttgtagaatcttcaagtggatatttggagggtttgtggcctgtggtggaaaaggaaatatattcacataaaaactagatagaagcattctgagaaacttctttgtgatgtgctcattcaattcacagagttgagcttttcttttgattgagcagtttggaatcagtctttttgtagaatctgcaagtggatatttggagcgcatgacggcctatagtggaaaaggaaatatattcacataaaaactagacagaagcattctgagaaactttttatgatgtgctcattcaactcacagagttgaacttttcttttgtttgagcagtttgcaaacagtctttttgtagaatctgcaagtggatattaggagtgcattacggcctatagtggaaaatgaaataacttcacataaaaaatagacagaaacattatgagaaactgctctgtgatgcgtgcattcatcaccagagttgaatttctcttttgattgaacagttttgaaacactctctctgtagaatctgaaagggatatttggagcgctttgcagcctatggtgaaaaaggaaatatcttcaaataaaagctagacagaagcattctaagaaagtgcattatgacgtgtgcattcatctcacagtgttgaacctttcttttgattgagcagttttgaaacactcttattgtagaatctgcaagtggatatttgcagagtttgaggccactggtggaaaagcaaatatcttcacatcaaaactagacagaatcattataagtaatctctttgagatgcgtgcattcaactcacagagttggacatttcctttgattgagcagtgtggaaacagtctttttgcagtatctgcaaacggatatttggagcactttcaggcctatagtaggaaaggaaatatcttcacataaaaactagacaggaaattactgagaaacttcttaatgatatgtgcattcatctcacagagttgaaacttcttttgattgagcagtttggaaacactcttttagtagaaactgcaaggggatatttggagcgttttgtggtctatggtagaaaaggctatatcttcacataaaaatagaagcattctgaggaacttcatgatgtgtgcattcatctcaaagagtttaacttgtcttttgactgagcagctttgaaaaactctttctgcagaatctgcaagttgatatttggagtgctttgtggcctatagtagaaaaggaaatatctttacataaaactagacagaagcattctgagaaacttctttgtgatgtgtgcattcatctcacagagttgaatctttcttttgtttgagcagttttgaaactctttctgtagaatcttcaagtggatattttcagcgctttgaggcctatggtggaaaagaaattatcttcacataaaaactagtcagaagcattctgagaaacttctttgtgacgtgtgcattcaactcatggagttcaacctttcttttgattcagcagtttggaaacagtctttttacagtatctgcaaatggctatttggagagctttgaggcctatggtgtaaaaggaaatctcttcccataaaaactagacagcagcattctgagaaacttatttgtgatctgtgcattcatctcacagagttgaacctttcttttgattcagcagttttgaaactgtcgttttgtagaatctgcaaaggaatatttgtgagcccattgaggcttcctggggtgataggaaatatcttcacataaaaactagacagaagttttggagaaatttattttgatgtgtgcattcatctcacacagttgaaattttcttttgattgagcagtgtggatacactcgttttgtagagtctgcaagtggatatttggagcactttgtggcctatagtgaaaaaggaaatatcttcacataaaaactagacagaagaattctgagaaacttcctttgaatgtgcgcatttatctcacagtgttgaacctttttttgattgagcagcttctaaacagtcattttgtagaatatgcaaaggaatatttttgagcccattgatgcctctggggaaataggaaatatcttcaaataaaaactagacagaatctttctcagaaacgtcttggtgatgtgtgcattcatctcactgagttgaactttattttgattgagcagtttggaaacagtcttttctagtatctgcaaatggatattttaagcactctgaggcctacggtgaaaaaggaaatatcttcaatataaaccagacagaagcattcatagaaacttctttgggatgtgtacattcatctcaccgactagaacctttcttttgattgagcagttttgaaacactcttttagcggaatctgcaagtgtttatttggagcgcatgaggaatatggtggaaaaggaatcttcttcacataaaaacgagacggaagcattcttagaaacttctctgtgatggatgcattcatttcacagagttaaacctttcctgtgattgagcggtttggaaacagtagttttttacaatctgcagaaggatacttgtgagccgattgaggtctatggggtgataagaaatatgttcacataaaaactagatagaaagtttctgagaaacttctttgtgatatttgcttttatctcctagagttgaaactttctttttattgagaagtttgggaacagtctttttgtagtatctacaaatggatattaccagtgctttgaggcctatggtggaaaaggaaatatcttcacataaaaacaaggcagaagcattctgagaaacttctttttgatgtctgcattcatctcacagagttgaacctttcttttgattgagcagttttgaaacgctctatttgtagtatctgcaattggatatttggaacgctttgaggcctatagtggaaaaggaaatatcttcacataaaaaactagaaagaagaattctgagaaacttcctaggaaggtgtattttcgtctcacactgttaaacccgtcttttgattgagcagcttcgatacagtcatttagtagaatatgaaagggaatatttgagagcccattgaggcctctggggaaataagacatatcttcacctaaaaactagacaaaatctttctgagaaacacccttgtgatgtgtgcattcatcatacacagttgaactttcttttgattgagcagtttggatacagtcatttgtattatctgtaaatggatatttggagtgtactgaggcctatggtgaaaaaggaagtatcctcacataaaattcagatggaagcattcttagaaactcctttgtgatgtgtgcactcatctcacagacttcaaactttctattgattgagcagttttgaaacactctttttgtagaatctgccagtggatacttggagcgctctgtggcccatagtggaaaaggaaatatcttcataaaaaaaataaacagaagcactttgagaactttctctgggttgtatgcagtcatatctcagacatgaaactttctttggtacagcagttttaaaacactctttttggagattctgaaagtagatatttggagagacttgaggactacggtggaaaaggaaatatcttcacaaaaaaactagacagaaacattctgagaagcgtctttttgatatgtgcatccatctcaaagagttgaacctttcttttgattgagcatttttgaagcactctttttgtagaatcttcaagtggatatttggagagtttgtggcctgtggtggaaaaggaaatatattcacataaaaactagatagaagcattctgagaaacttctttgtgatgtgctcattcaactcacagagttgagcttttcttttgattgagcagttgggaaacagtctttttgtagaatctgcaagtggatatttggagcgcattacggcctatagtggaaaaggaaatatattcacataaaaactagacagaagcattctgagaaacttctttgtgatgtgctcattcaactcacagagttgaacttttcttttgtttgagcagtttgcaaacagtctttttgtagaatctgcaagtggatattaggagtgcattatggcctatagtggagaatgaaatatcttcacataaaaactagacagaaacattatgagaaactgctttgtgatgtgtgcattcatcaccagagttgagtttctcttttgattgaacagttttcaaacactctttctgtagaatctgaaagggatatttggagcgctttgcagcctatggtgaaaaaggaaatatcttcacataaaagctagacagaagcattctaagaaagtgctttgtgacgtgtgcattcatctcacagtgttgaagctttcttttgattgagcagttttgaaacactcttattgtagaatctgcaagtggatatttggagagtttgaggtcactggtggaaaagcaaatatcttcacatcaaaactagacagaatcattataagtaatctctttgagatgcgtgcattcaactcacagagttggacatttcctttgattgagcagtttggaaacagtctttatgcagtatctgcaaacggatatttggagcactttcaggcctatagtaggaaaggaaatatcttcacataaaaactagacagcaaattactgagacactacttaatgttgtgtgcattcatctcacagagttgaaactttcttttgattgagccgtttggaaacactcttttagtagaaactgcaaggggatatttggagcgttttgtggtctatggtagaaaaggatatatcttcacataaaaatagaagcattctgaggaacttcatgatgtgtgcattcatctcaaagagttgaacttttcttttgattgagcagctttgaaaaactctttctgcagaatctgcaagttgatatttggaatgctttgtggcctatagtagaaaaggaaatatctttacataaaactagacagaagcattctgagaaacttctttgtgatgtgtgcattcatctcacagagttgaatctttcttttgtttgagcagttttgaaactctctttctgtagaatcttcaagtgaatattttcagcgctttgaggcctatggtggaaaagaaaatatcttcacataaaaactagtcagaagcattctgagaaacttctttgtgacgtgtgcattcaactcatggagttcaacatttcttttgattcagcagtttggaaacagacttttcacagtatctgcaaatggatatttggagagctttgaggcctatggtggaaaaggaaatctcttcccataaaaactagacagcagcattgtgagaaacttatttgtgatctgtgcattcatctcacagtgttgaacctttcttttgattcagcagttttgaaactgtcgttttgtagaatctgcaaaggaatatttgtgagcccattgaggcttctggggtgataggaaatatcttcacataaaaactagacagatacttcctgagaaactattttgtcatgtgtgacttctactcaccgggttgaaactttctcttgattgagcagtttggaaacagtctttttgtagaatctgcaaattgatatttggagtgcttttggcctacgttgaaaaacgaaatatcttcccctaaaaagtaggcagaagttttggagaaatttattttgatgtgtgcgttcatctcacacagttgaaattttcttttgattgagcagtgtggatacactcgttttgtagagtctgcaagtggatatttggagcactttgtggcctatagtgaaaaaggaaatatcttcacataaaaactagatagaagaattctgagaaacttcctttgaatgggcgcattcatctcacactgttgaactttttttttcattgagcaccttctaaacagtcattttgtagaatatgcaaaggaatatttgtgagcccattgatgcctctggggaaacaggaaatatcttcacataaaaacgagacagaatctttctcagaaacgtcttggtgatgtgtgcattcatctcactgagttgaactttactttgattgagcagtttggaaacagtcttttctagtatatgcaaatggatattttaagcactctgaggcctacggtgaaaaaggaaatatcttcaatataaatcagacagaagcattcatagaaacttctttgtgatgtgtgcattcatctcaccgactagaacctttcttttgattgagcagttttgaaacactcttttagcggaatctgcaagtgtttatttggagcgcatgaggaatatggtggaaaaggaatcttcttcacataaaaacgagacggaagcattctgagaaacttctctgtgatggatgcattcatttcacagagttaaacctttcctgtgattgagcggtttggaaacagtagatgtttataatctgcagaaggatacttgtgagccgattgaggtctatggggtgataagaaatatgttcacataaaaactagatagaaagtttctgagaaacttctttgtgatatttgcttttatctcatagagttgaaactttctttttattgagcagtttgggaacagtctttttgtagtatctgcaaatggatattaccagttctttgaggcctgtggtgaaaaaggaaatatcttcacataaaaacaaggcagaagcattctgagaaacttctttgtgatgtctgcattcatctcacagagttgaacctttcttttgattgagcagttttgaaacgctctatttgtagtatctgcaagtggatatttggaacgatttgaggcctattgtcgaaaaggaaatatcttcacataaaaaactagaaagaagaattctgagaaacttcctaggaaggtgtattttcgtctcacactgttaaacccgtcttttgattgagcaacttcgatacagtcatttagtagaatataaaagggaatatttgagagcccattgaggcctctggggaaaaaagaaatatcttcacctaaaaactagacaaaatctttctgagaaacacccttgtgatgtgtgcattcatcatacacagttgaactttcttttgattgagcagtttggatacagtcatttgtattatctgtaaatggatgtttggagtgtactgaggcctatggtgagaaaggaaatatcctcacataaaattcagatggaagcattcttagaaactcctttgtgatgtgtgcattcatctcacagacttcaaactttctatagattgagcagttttgaaacactctttttgtagaatctgccagtggatatttggagcgctctgtggcccatagtggaaaaggaaatatcttcataaaaaaaataaacagaagcactttgagaaacttctctgtgttgtatgcagtcatatctcagacatgaaactttctttggtacaggagttttaaaacactctttttggagattctgaaagtagatatttggagagacttgaggactacggtggaaaaggaaatatcttcacaaaaaaactagacagaaacattctgagaagcttctttgtgatgtgtgcatccatctcaaagagtggaacctttcttttgattgagcatttttgaagcactctttttgtagaatcttcaagtggatatttggagtgtttgtggcctgtggtggaaaaggaaatatattcacataaaaactagatagaagcattctgagaaacttctttctgatgtgctcattcaactcacagagttgagcttctcttttgattgagcagtttggaaacagtctttttgtagaaactgcaagtggatatttggagcgcattacggcctatagtggaaaaggaaatatattcacataaaaactagacagaagcattctgagaaacttctttgtgatgtgctcattcaactcacagagttgaacttttcttttgtttgagcagtttgcaaacagtctttctgtagaatctgcaagtggatattaggagtgcattacggcctatagtggaaaaggaaatatcttcacataaaaactagacagacaaacatgatgagaaactgctttgtgatgcgtgcattcatcaccagagttgagtttctcttttgattgaacagttttgaaacactctttctgtagaatctgaaagggatatttggagcgctttgcagcctatggtgaaaaaggaaatatcttcacataaaagctagacagaagcattctaagaaagtgcattgtgacgtgtgcattcatctcacagtgttgaacctttcttttgattgagcagttttgaaacactcttattgtagaatctgcaagtggatatttgcagagtttgaggccactggtggaaaagcaaatatcttcacatcaaaactagacagaaccattctgagaaatctctttgagatgcgtgcattcaactcatagagttggacctttcctttgattgagcagtttggaagcagtctttttgcagtatctgcaaatggatatttggagcactttcaggcctatagtaggaaaggaaatatcttcaaataaaaactagacagaaaattactgagaaacttcttaatgatgtgtgcattcatctcacagagttgaaactttcctttgattgagcagtttggaaacactcttttagtagaaactgcaaggggatatttggagcgttttatggtctatggtagaaaaggttatcttcacataaaaatagaagcattctgaggaacttcctgatgtgtgcattcatctcaaagagttgaacttttcttttgattgagcagctttgaaaaactctttctgcagaatctgcaagttgatatttggagtgctttgtggcctatagtagaaaaggaaatatctttacataaaactagacagaagcattctgagaaatttctttctgatgtgtgcattcatctcacgaagttgaaccattcttttaattgagcagttttgaaacacactttttgcagtatcttcaagtggatatttgtagagctttgaggcctatggtagaaaaggaaacattgtcacataaaaactagacagaagcattctgagaaacttctttgtgacgtgtgcattcaactcatggagttcaacctttcttttgattcagcagtttggaaacagtctttttacagtatctgcaaatggctatttgtagagctttgaggcctatggtggaaaaggaattatcttcccataaaaactagacagcagcattctgaggaacttatttgtgatctgtgcattcatctcccagagttgaacctttcttttgattcagcagttttgaaactgcctttttgtagaatctgcaaaggaatatttgtgagcccattgaggcttctggggtgataggaaatatcttcacgtaaaaactagacagatactttctgagaaactattttgtcatgtgtgacttcaactcaccgagttgaaactttctcttgattgagcagtttggaaacagtctttttgtagaatctgcaaattgatatttggagcgcatttggcctatgttgaaaaacgaaatatcttcccataaaaagtaggcagaagttttggagaaatttatttgtgatgtgtgcattcatctcacacagttgaaattttcttttgattgagcagtgtggatacactctttttgtagagtctgcaagtggatatttggagcactttgtggcctatagtgaaaaaggaaatatcttcacataaaaactagacagaagaattctgagaaactgcctttgaatgggcgcattcatctcacactgttgaactttttttttgattgagcaccttctaaacagtcattttgtagaatatgcaaaggaatatttgtgagcccattgatgcctctggggaaacaggaaatatcttcacataaaaacgagacagaatctttctcagaaacgtcttggtgatgtgtgcattcatctcactgagttgaactttactttgattgagcagtttggaaacagtctttactagtatctgcaaatggatattttaagcactctgaggcctacggtgaaaaaggaaatatcttcaatacaaatcagacagaagcattcatagaaacttctttgtgatgtgtgcattcatctcaccgactagaacctttcttttgattgagcagttttgaaacactcttttagcggaatctgcaagtgtttctttggagcgcatgaggaatatggtggaaaaggaatcttcttcacatgaaaacggacggaagcattctcagaaacttctctgtgatggatgcattcatttcacagagttaaacctttcctgtgattgagcggttgagaaagagtagttttttacaatctgcagaaggatacttgtgagccgattgaggtctatggggtgataagaaatatgttcacataaaaactagatagaaagtttctgagaaacttctttgtgatatttgcttttatctcctagagttgaaactttctttttattgagcagtttggggacagtctttttgtagtatctgcaaatggatattaccagtgctttgaggcctatggtggaaaaggaaatatcttcacataaaaacaacgcggaagcattctgagaaacttctttttgatgtctgcattcatctcacagagttgaacctttcttttgattgagcagttttgaaacgctctatttgtggtatctgcaagtggatatttggaacgctttgaggcctatagtggaaaaggaaatatcttcacataaaaaactagaaagaagaattctgagaaacttcctaggaaggtgtattttcgtctcacactgttaaacccgtcttttgattgagcagcttcgatacagtcatttagtagaatatgaaagggaatatttgaaagcccattgaggcctctggggaaataagaaatatcttcacctaaaaacaagacaaaatctttctgagaaacacccttgtgatgtgtgcattcatcatacagagttgaactttcttttgattgagcagtttggatacagtcatttgtattatctgtaaatggatatttggagtgtactgaggcctatggtgaaaaaggaaatatcctcacataaaattcagatggaagcatattgagaaacttctctgtgatgtgtccattcatctcatagagtaaaatcttccttttgattgagcaggtttgaaacactctttttgtagaatctgcaagtggatatttggagcgctctgtggcccatagtggaaaaggaaatatcttcataagaaaaataaacagaagcactttgagaaagttctctgtgttgtatgcagtcatatctcagacatgaaactttctttggtacagcagttttaaaacactctttttggagattctgaaagtagatatttggagagacttgaggactacggtggaaaaggaaatatcttcacaaaaaaactagacagaaacattctgagaagcttctttgtgatgtgtgcgtccatctcgaagagttgaacctttcttttgattgagcatttttgaagcactttttttgtagaatcttcaagtggttatttggagtgtttgtggtctctggtggaaaaggaaatatattcacataaaaactagatagaagcattctgagaaacttttttgtgatgtgctcattcaactcacagagttgagattttcttttgattgagcagtttggaaacagtctttttgtagaatctgccagtggatatttggagcgcatgacggcctatagtggaaaaggaaatatattcacatgaaaactagacagaagcattctgagaaacttctttgtgatgtgctcattcaactcacagagttgagcttttcttttgattgagcagtttggaaacagtctttttgtagaatctgcaagtggatatttggagcgcatgacggcctttagtggaaaaggaaatatattcacataaaaactagacagaaacatgatgagaaactgctttgtgatgcgtgcattcatcaccagagttgagtttctcttttgattgaacagttttgaaacactctttctgtagaatctgaaagggatatttggagcgctttgcagcctatggtgaaaaaggaaatatcttcacataaaagatagacagaaagcattctgagaaagtgctttgtgaggtgtacattcatctcacagaagttaaacctttcttttgattgagcagttttgaaacactcttattgtacaatctgcaagtggatatttggagagtttgaggccactggtggaaaagcaaatatcttcacataaaaactagacagaatcattagaagtaatctctttgagatgcgtgcattcaactcacagagttggacatttcctttgattgagcagtgtggaaacagtctttttgcagtatctgcaaacggatatttgcagcactttcaggcctatagtaggaaaggaaatatcttcacataaaaactagacagaaaattactgagaaactccttaatgatgtgtgcattcatctcacagagttgaaactttctttccattgagccgtttggaaacactcttttagtagaaactgcaaggggatatttggagcgttttgtggtctatggtagaaaaggatatatcttcacataaaaatagaagcattctgaggaacttcatgatgtgtgcattcatctcaaagtgttgaacttttcttttgattgagcagctttgaaaaactctttctgcagaatctgcaagttgatatttggagtgctttgtggcctagagtagaaaaggaaatatctttacataaaactagacagaagcattctaagaaagtgctttgtgaagtgtgcattcatctcacagagttgaatcattcttttgtttgaccagttttgaaactctctttctgtagaatcttcaagtggatattttcagcgctttgaggcctatggtggaaaagaaaatatcttcacataaaaactagtcagaagctttctgagaaacttctttgtgatgtgtgcattcaactcatggagttgaacctttcctttgattcagcagtttggaaacagtctttttgtagtatctgcaaatggatatttggagagctttgaggcctatggtggaaaagaaaatatcttcacataaaaactagacagatacatcctgagaaactattttgtcatgtgtgacttctactcaccgggttgaaactttctcttgattgagcagtttggaaacagtagttttttacagtctgcagaaggatacttgtgagccgattgaggtctatggggtgataggaaatatgttcacataaaaactagatagaagttttgtaaaaatttatttagatgtgtgcattcatctcacacagttgaaattttcttttgattgggcagtgtggatacactcgttttgtagggtctacaagtggatatttggagcactttgtggcctatagtgaaaaaggaaatatcttcacataaaaactagatagaagaattctgagaaacttcctttgaatgggcgcattcatctcacactgttgaactttttttttgattgagcaccttctaaacagtcattttgtagaatatgcaaaggaatatttgtgagcccattgatgcctctgcggaaacaggaaatatcttcacataaaaacgagacagaatctttctcagaaacgtcttggtcatgtttgcattcatctcactgagttgaactttattttgattgagcagtttggaaagtgtcttttctagtatctgcaaatggatattttaagcactctgaggcctacggtgaaaaaggaaatatcttcaatataaatcagacagaagcattcatagaaacttctttgtgatgtgtgcattcatctcaccgactagaacctttcttttgattgagcagttttgaaacactcttttagcggaatctgcaagtgtttctttggagcgcatgaggaatatggtggaaaaggaatcttcttcacatgaaaacgagacggaagcattctgagaaacttctctgtgatggatgcattcatttcacagagttaaacctttcctgtgattgagcggtttggaaacagtagttttttacagtctgcagaaggatacttgtgagccgattgaggtctatgggatgataagaaatatgttcacataaaaactagatagaaagtttctgagaaacttctttgtgatatttgcttttatctcctagagttgaaactttctttttattgagcagtttgggaacagtctttttgtagtatctgcaaatggatattaccagtgctttgaggcctatggtgaaaaaggaaatatcttctcataaaaacaaggcagaagcattctgagaaacttctttttgatgtctgcattcatctcacagagttgaacctttcttttgattgagcagttttgaaacgctctatttgtagtatctgcaagtggatatttggaacgctttgaggcctatagtggaaaaggaaatatcttcacataaaaaactagaaagaagaattctgagaaacttcctaggaaggtgtattttcgtctcacactgttaaacccgtcttttgattgagcagcttcgatacactcatttagtagaatatgaaagggaatacttgagagcccattgaggcctctggggaaataagaaatatcttcacctaaaaactagacaaaatctttctgagaaacacccttgtgatgtgtgcattcatcatgcacagttgaactttcttttgattgagcagtttggatacagtcatttgtattatctgtaaatggatatttggagtgtactgaggcctatggtgaaaaaggaaatatcctcacataaaattcagatggaagcattcttagaaactcctttgtgatgtgtgcattcatctcacagacttcaaactttctatagattgagcagtgttgaaacactctttttgtagaatctgccagtggatatttggagcgctctgtggccaatagtggaaaaggaaatatcttcataaaaaaaataaacagaagcactttgagaaagttctctgtgttgtatgcagtcataaaatcagacatgaaactttctttggtacagcagttttgaaacactctttttggagattctgaaagtagatatttggagagacttgaggactacggtggaaaaggaaatatcttcacaaaaaaactagacagaaacattctgagaagcttctttgtgatgtgtgcgtccatctcgaagagttgaacctttcttttgattgagcatttttgaagcactctttttgtagaatcttcaagtggatatttggagggtttgtggcctgtggtggaaaaggaaatatattcacataaaaactagatagaagcattctgagaaacttctttgtgatgtgctcattcaactcacagagttgagcttttcttttgattgagcagtttggaaacactctttttgtagaatctgcaggtggatatttggagcgcattatggcctatagtggaaaaggaaatatattcacataaaaactagacagaagcattctgagaaacttctttgtgatgtgctcattcaactcacagagttgaacttttcttttgtttgagcagtttgcaaacagtctttctgtagaatctgcaagtggatattaggagtgccttacggcctatagtggaaaatgaaatatcttcacataaaaactagacagaaacattatgagaaactgctttgtgatgcgtgcattcatcaccagagttgagtttctcttttgattgaacagttttgaaacactctttctgtagaatctgaaagggatatttgcagcgctttgcagcctatggtgaaaaaggaaatatcttcacataaaagctagacagaagcattctaagaaagtgctttgtgacgtgtgcattcatctcacagtgttgaacctttcttttgattaagcagttttgaaacactcttattgtagaatctgcaagtggatatttggagagtttgaggccactggtggaaaagcaaatatcttcacatcaaaactagacagaatcattataagtaatctctttgagatgcgtgcattcaactcacagagttggacatttcctttgattgagcagtttggaaacagtctttttgcagtatctgcaaacggatatttggagcactttcaggcctatagtaggaaaggaaatatcttcacataaaaactagacacaaaattactgagaaacttcttaatgatgtgtgcattcatctcacagagttgaaactttcttttgattgagccgtttggaaacactcttttagtagaaactgcaaggggatatttggagagttttgtggtctatggtagaaaacgatatatcttcacataaaaatagaagcattctgaggaacttcatgatgtgtgcattcatctcaaagagttgaacttttcttttgattgagcagctttgaaaaactctttctgcagaatctgcaagttgatatttggagtgctttgtggcctatagtagaaaaggaaatatctttacttaaaactagacagaagcattctgagaaacttctttgtgatgtgtgcattcatctcacagagttgaatctttcttttgtttgagcagttttgaaactctctttttgtagaatcttcaagtggatattttcaatgctttgaggcttatggtggaaaagaaaatatcttcacataaaaactagccagaagcattctgggaaatttttgtgacgtgtgcattcaactcatggagttcaacctttcttttgattcagcagtttggaaacagtctttttacagtatctgcaaatggctatttggagagctttgaggcctatggtggaaaaggaaatatcttcccataaaaagtagacagcagcattctgagaaactcatttgtgatctgtgcattcatctcccagagttgaacctttcttttgattcagcagttttgaaactgtcgttttgtagaatctgcaaaggaatatttgtgagcccattgaggcttctggggtgataggaaatatcttcacgtaaaaactagacagatactttctgagaaactattttgtcatgtgtgacttctactcaccgggtagaaactttctcttgattgagcagtttggaaacagtctttttgtagaatctgcaaattgatatttggagcgcttttggcctacgttgaaaaacgaaatatcttcccataaaaagtaggcagaagttttggagaaatttattttgatgtgtgcattcatctcacacagttgaaattttcttttgattgggcagtgtggatacactcgttttgtagagtctgcaagtggatatttggagcactttgtggcctatagtgaaaaaggaaatatcttcacataaaaactagatagaagaattctgagaaacttcctttgaatgtgtgcattcatctcacagtgttgaacttttttcttgattgagcagcttctaaacagtcattttgtagaatatgcaaaggaatatttgtgagcccattgatgcctcctggggaaataggaaatatcttcaaataaaaactagacagaatctttctcagaaacgtcttggtgatgtgtgcatttatctcactgagttgaactttactttgattgagcagtttggaaacagtgttttctagtatctgcaaatggatattttaagcactctgaggcctacggtgaaaaaggaaatatcttcaatataaatcagacagaagcattcatagaaacttctttgtgatgtgtgcattcatctcactgactagaacctttcttttgattgagcagttttgaaacactcttttagcggaatctgcaagtgtttctttggagcgcatgaggaatatggtggaaaaggaatcttcttcacatgaaaacggacggaagcattctgagaaacttctctgtgatggatgcattcatttcacagagttaaacctttcctgtgattgagcggtttggaaacagtagttttttacagtctgcagaaggatacttgtgagccgattgaggtctatggggtgataagaaatatgttcacataaaaactagatagaaagtttctgagaaacttctttgtgatatttgcttttatctcatagagttgaaactttctttttattgagcagtttgggaacagtctttttgtagtatctgcaaatggatattgccagtgctttgaggcctatggtgaaaaaggaaatatcttcacataaaaacaaggcagaagcattctgagaaacttctttttgatgtctgcattcatctcgcagagttgaacctttcttttgattgagcagttttgaaacgctctatttgtagtatctgcaagtggatatttggaacgctttgaggcctatagtggaaaaggaaatatcttcacataaaaaactagaaagaagaattctgagaaacatcctaggaaggtgtattttcgtctcacactgttaaacccgtcttttgattgagcagcttcgatacagtcatttagtagaatatgaaagggaatatttgagagcccattgaggcctctggggaaataagaaatatcttcacctaaaaactagacaaaatctttctgagaaacacccttgtgatgtgtgcattcatcatacacagttgaactttcttttgattgagcagtttggatacagtcatttgtattatctgtaaatggatatttggagtgtactgaggcctatggtgaaaaaggaaatatcctcacataaaattcagatggaagcattctcagaaactcccttgtgatgtgtgcattcatctcacagacttcaaactttctattgattgagcagttttgaaacactctttttgtagaatctgcaagtggatatttggagcgctctgtggcccatagtggaaaaggaaatatcttcataaaaaaaataaaaagaagcactttgagaaagttctctgtgttgtatgcagtcatatctcagacatgaagctttctttggtacagcagttttaaaacactctttttggagattctgaaagtagatatttggagagacttgaggactacgttggaaaaggaaatatcttcacaaaaaaactagacagaaacattctgagaagcttctttgtgatgtgtgcatccatctcaaagagttgaacctttcttttgattgagcatttttgaagcactctttttgtagaatcttcaagtggatatttggagtgtttgtggcctgtggtggaaaaggaaatatattcacataaaaactagatagaagcattctgagaaacttctttgtgatgtgctcattcaactcacagagttgagcttttcttttgattgagcagtttggaaacagtctttttgtagaatctgcacgtggatatttggagcgcatgacggcctatagtggaaaaggaaatatattcacataaaaactagacagaagcattctgagaaacttctttgtgatgtgctcattcaactcacagagttgaacttttcttttgtttgagcagtttgcaaacagtctttttgtagaatctgcaagtggatattaggagtgcattacggcctatagtggagaatgaaatatcttcacattaaaactagacagaaacattatgagaaactgctttgtgatgtgtgcattcatcaccagagttgagtttctcttttgattgaacagttttcaaacactctttctgtagaatctgaaagggatatttggagcgctttgcagcctatggtgaaaaaggaaatattttcacataaaagctagacagaagcattctaagaaagtgctttgtgatgtgtgcattcatctcacagtgttgaacctttcttttgaatgagcagttttgaaacactcttattgtagaatctgcaagtggatatttggagagtttgaggccactggtggaaaagcaaatatcttcacatcaaaactagacagaatcattataagtaatctctttgagatgcgtgcattcaactcacagagttggacgtttcctttgattgagcagtttggaaacagtctttttgcagtatctgcaagcggatatttggagcactttcaggcctatagtaggaaaggaaatatcttcacataaaaactagacagaagcattctgagaaacttctttgtgatgtgtgcattcatctcacaaagttgaaactttcttttgattgagccgtttggaaacactattttagtagaaactgcaaggggatatttggagcgttttgtggtctatggtagaaaaggatatatcttcacataaaaatagaagcattctgaggaacttcctgatgtgtgcattcatctcaaagagttgaacttttcttttgattgagcagctttgaaaaaccctttctgcagaatctgcaagttgatatttggagcgctttgtggcctatagtagaaaaggaaatatctttacttaaaactagacagaagcattctgagaaacttctttgtgatgtgtgcactcatgtcacagagttgaaactttcttttgtttgagcagttttgaaactctctttttgtagaatcttcaagtgtatatttttagcactttgaggcctatggtggaaaagaaaatgtcttcacataaaaactagtcagaagcattctgagaaacttctttgtgacgtgtgcattcaactcatggagttcaacctttcttttgattcagcagtttggaaacagtctttttacagtatctgcaaatggctatttggagagctttgacacctatggtggaaaaggaaatctcttctcataaaaactagacagctactttctgagaaactattttgtcgtgtgtgacttctactcaccgggttgaaactttctcttgattgagcagtttggaaacagtctttttgtagaatctgcaaattgatatttggagtgcttttggcctacgttgaaaaacgaaatatcttcccataaaaagtaggcagaagttttggagaaatttattttgatgtgtgcattcatctcgcacagttgaaattttcttttgattgagcagtgtggatacattcgttttgtagagtctgcaagtggatatttggagcactttgtggcctacagtgaaaaaggaaatatcttcacataaaaactagatagaagaattctgagaaacttccgttgaatgggcgcattcatctcacactgttgaactttttttttgattcagcaccttctaaacagtcattttgtagaatatgcaaaggaatatttgtgagcccattgatgcctctggggaaacaggaaatatcttcacataaaaacgagacagaatctttatcagaaacgtcttggtgatgtgtgcattcatctcactgagttgaactttaatttgattgagcagtttggaaacagtcttttctagtatctgcaaatggatattttaagcactctaaggcctacggtgaaaaaggaaatatcttcaatataaatcagacagaagcattcatagaaacttctttgtgatgtgtgcatacatctcaccgactagaacctttcttttcattgagcagttttgaaacactcttttagcggaatctgcaagtgtttatttggagcgcatgaggaatatggtggaaaaggaatcttcttcacataaaaacgagacggaagcattctgagaaacttctctgtgatggatgcattcatttcacagagttaaacctttcctgtgattgagcggtttggaaacagtagttttttacaatctgcagaaggatacttgtgagctgattgaggtctatggggtgataagaaatatgttcacataaaaactagatagaaaatttctgagacacttctttgtgatatttgctttcatctcacagagttaaaactttcttttgattgagcagtttgggaaaagtctttttgtagtatctggaaatggatattaccagtgctttgagacctatggtgaaaaaggaaatatcttcccataaatacaaggcagaaactttctgagaaacttctttctgatgtgtgctttcatctcacagatttgaacttttcttttgattgagcagttttgaaacagtctttttgtacaatctgcaagtggatatttggggcactttcaggcctatgggggaaaaggacacatcttccaataaaaactagacagcagagttctgagaaacttcctaggaatgtgtgctttcttctcacactgttgaacctttcttttgattgagcagcttcgatacagtcatttagtagaatctgaaagagaatatttgcgagcccattgaggcctcttggaaagtaggaaatatcttcacctaaaaactagacaaaaactttctgagaaacacccttgtgttgtgtgcattcatcatacacagttgaactttcttttgattgagcagtttggatacagtcatttgtattatctgtaaatgggtatttggagtgtactgaggcctatggtgaaaaaggaaatatcctcacataaaattcagatggaagcatattgagaaacttctctgtgatgtgtccattcatctcatagagtaaaatcttccttttgattgagcaggtttgaaacactctttttgtagaatctgcaagtggatatttggagcgctctgtggcccatagtggaaaaggaaatatcttcataaaaaaaataaacagaagcactttgagaaacttctctgtgttgtatgcagtcatatctcagacatgaaaatttctttggtacagcagttttaaaacactctttttggagattctgaaagtagatatttggagagacttgaggactacggtggaaaaggaaacatcttcacaaaaaaactagacagaaacattctgagaagcttctttgtgatgtgtgcgtccatctcgaagagttgaacctttcttttgattgagcatttttgaagcactttttttgtagaatcttcaagtggttatttggagtgtttgtggcctctggtggaaaaggaaatatattcacataaaaactagatagaagcattctgagaaacttctttgtgatgtgctcattcaactcacagagttgagcttttcttttgattgagcagtttggaaacagtctttttgtagaatctgcaagtggatatttggagcgcatgacggcctatagtggaaaaggaaatatattcacataaaaactagacagaagcattctgagaaacttctttgtgatgtgctcattcaactcacagagttgaacttttcttttgtttgagcagtttgcaaacagtctttttgtagaatctgcaagtggatattaggagtgcattacggcctatagtggaaaatgaaataacttcacataaaaaatagacagaaacatgatgagaaactgctttgtgatgcgtgcattcatcaccagagttgagtttctcttttgattgaacagttttgaaacactctttctgtagaatctgaaagggatatttggagcgctttgcagcctatggtgaaaaaggaaatatcttcacataaaagctagacagaagcattctaagaaagtgctttgtgacgtgtgcattcatctcacagtgttgaacctttcttttgattgagcagttttgaaacactcttattgtagaatctgcaagtggatatttggagagtttgaggccactggtggaaaagcaaatatcttcacatcaaaaccagacagaatcattataagtaatctctttgagatgcgtgcattcaactcacagagttggacatttcctttgattgagcagtttggaaacagtctttttgcagtatctgcaagcggatatttggagcactttcaggcctatagtaggaaaggaaatatcttcacataaaaactagacagaaaattactgagaaatttctcagtgatgtgtgcattcatctcacagagttgaaactttcttttgattgagcagtttggaaacactcttttagtagaaactgcaaggggatatttggagcactttgtggtctttggtagaaaaggatatatcttcacattaaaaatagacagaagcattctgaggaacttcctgatgtgtgcattcatctcaaagagttgaaattttcttttgattgagcagctttgaaaaaccctttctgcagaatctgcaagttgatatttggagcgctttgtggcctatagtagaaaaggaaatatctttacttaaaactagacagaagtattctgagaaacttctttgtgatgtgtgcattcatctcacagagttgaatctttcttttgtttgagcagttttgaaactctctttctgtagaatcttcaagtggatattttcagcgctttgaggcctatcttggaaaagaaaatatcttcccataaaaactagtcagaaccattctgagaaacttctttatgacgtgtgcattcaactcatggagttcaacctttcttttgattcagcagtttggaaacagtctttttacagtatctgcaaatggctatttggagagctttgaggcctatggtggaaaaggaaatctcttcccattaaaactaggcagcagcattctgagaaacttatttgtgatctgtgcattcatctcccagagttgaacctttcttttgattcagcagttttgaaactgcctttttgtagaatctgcaaaggaatatttgtgagcccattgaggcttctggggtgataggaaatatcttcacgtaaaaactagacagataatttctgagaaactattttgtcatgtgtgacttctactcaccgggttgaaactttctcttgattgagcagtttggaaacagtctttttgtagaatctgcaaattgatatttggagtgcttttggcctacgttgaaaaacgaaatatcttcccataaaaagtaggcagaagttttggagaaatttattttgatgtgtgcattcatctcacacagttgaaattttcttttgattgagcagtgtggatacactcgttttgtagagtctgcaagtggatatttggagcactttgtggcctatagtgaaaaaggaaatatcttcacataaaaactagatagaagaattctgagaaacttcctttgaatgtgtgcattcatctcacagtgttgaacttttttcttgattgagcagcttctaaacagtcattttgtagaatatgcaaaggaatatttgtgagcccattgatgcctctggggaaataggaaatatcttcaaataaaaactagacagaatctttctcagaaacgtctttgtgatgtgtgcattcatctcactgagttgaactttactttgattgagcagtttggaaacagtcttttctagtatctgcaaatggatattttaagcactctgaggcctacggtgaaaaaggaaatatcttcaatataaatcagacagaagcattcatagaaacttctttgtgatgtgtgcattcatctcaccgactagaacctttcttttggttgagcagttttgaaacactcttttagcggaatctgcaagtgtttatttggagcgcatgaggaatatggtggaaaaggaatcttcttcacatgaaaacgagacggaagcattctgagaaacttctctgtgatggatgcattcatttcacagagttaaaactttcctgtgattgagcggtttggaaacagtagttttttacaatctgcagaaggatacttgtgagccgattgaggtctatggggtgataagaaatatgttcacataaaaactagatagaaagtttctgagaaacttctttgtgatatttgcttttatctcctagagttgaaactttctttttattgagcagtttgggaacagtctttttgtagtatctgcaaatggatattaccagtgctttgaggcctatggtgaaaaaggaaatatcttcacataaaaacaaggcggaagcattctgagaaacttatatttgatgtctgcattcatctctcagagttgaacctttcttttgattgagcagttttgagaagctctatttgtagtatctgcaagtggatatttggaacgctttgaggcctatagtggaaaaggaaatatcttcacataaaaaactagaaagaagaattctgagaaacttcctaggaaggtgtattttcgtctcacactgttaaacctgtcttttgattgagcagctttgatacagtcatttagtagaatatgaaagggaatatttgagagcccattgaggcctctggggaaataagaaatatcttcacctaaaaactagacaaaaactttctgagaaatacccttgtgttgtgtgcattcatcatacacagttgaactttcttttgattgagcagtttggatacagtcatttgtattatctgtaaatgggtatttggagtgtactgaggcctatggtgaaaaaggaaatatcctcacataaaattcagatggaagcattcttagaaactcctttgtgatgtgtgcattcatctcacagacttcaaactttctattgattgagcagttttgaaacactctttttgtagaatctgccagtggatatttggagcgctctgtggccaatagtggaaaaggaaatatcttcataaaaaaaataaacagaagcactttgagaaacttctctgtgttgtatgcagtcatatctcagacatgaaaatgtctttggtacagcagttttaaaacactctttttggagattctgaaagtagatatttggagagacttgaggactacggtggaaaaggaaatatcttcacaaaaaaactagacaggaacattctgagaagcttctttgtgatgtgtgcatccatctcaaagagttgaacctttcttttcattgagcatttttgaagcactctttttgtagaaacttcaagtggatatttggagtgtttgtggcctgtggtggaaaaggaaatatattcacataaaaactagatagaagcattctgagaaacttctttgtgatgtcctcattcaactcacagagttgagcttttcttttgattgagcagtttggaaacagtctttttgtagaatctgcaagtggatatttggagcgcatgacggcctatagtggaaaaggaaatatattcacataaaaactagacagaagcattctgagaaacttcttcgtgatgtgctcattcaactcacagagttgaacttttcttctgtttgagcagtttggaaacagtctttttgtagaatctgcaagtggatattaggagtgcattacggcctatagtggaaaatgaaatatcttcacataaaaactagacagaaacattatgagaaactgctttgtgatgcgtgcattcatcaccagagttgaatttctcttttgattgaacagttttgaaacactctttctgtagaatctgaaagggatatttggagcgctttgcagcctatggtgaaaaagaaatatcttcacatataagctagacagaagcattctgagaaggtggtttgtgatgtgtgcattcatctcacagagttaaacctttctttggattgagcagttttgaaacactcttattgtacaatctgcaagtggatatttggagagtttgaggccactggtggaaaagcaaatatcttcacataaaaactagagagaatcattataagtaatctctttgagatgcgtgcattcaactcacagagttggacatttcctttgattgagcagtttggaaacagtctttttgcagtatctgcaaacggatatttggagcactttcaggcctatagtaggaaaggaaatatcttcacataaaaactagacagaaaattactgagaaacttcttaatgatgtgtgcattcatctcacagagttgaaactttcttttgattgagccgtttggaaacactcttttagtagaaactgcaaggggatatttggagcgttttgtggtctatggtagaaaaggatatatcttcacataaaaatagaagcattctgaggaacttcctgatgtgtacattcatctcaaagagttgaacttttcttttgattgagcagctttgaaaaactctttctgcagaatctgcaagttgatatttggggtgctttgtggcctatagtagaaaaggaaatatctttacataaaactagacagaagcattctgagaaacttctttgtgatgtgtgcattcatctcacagagttcaatctttcttttgtttgagcagttttgaaactctcttttggtagaatcttcaagtggatattttcagcgctttgaggcctacggtggaaaagaaaatatcttcacataaaaactagtcagaagcattctgagaaacttctttgtgacgtgtgcattcaactcatggagttcaacctttcttttgattcagcagtttggaaacagtctttttacagtatctgcaaatggctatttggagagctttgacgcctatggtggaaaaggaaatctcttctcataaaaactagacagctactttctgagaaactattttgtcatgtgtgacttctactcaccgggttgaaactttctgttgattgagcagtttggaaacagtctttttgtagaatctgcaaattgatatttggagtgcttttggcctacgttgaaaaacgaaatatcttcccataaaaagtaggcagaagttttggagaaatttattttgatgtgtgcactcatctcacacagttgaaattttcttttgattgagcagtgtggatacactcgttttgtagagtctgcaagtggatatttggagcactttgtggcctatagagaaaaaggaaatatcttcacataaaaactagatagaagaattctgagaaacttcctttgagtgggcgcattcatctcacactgttgaactttttttttgattgagcaccttctaaacagtcattttgtagaatatgcaaaggaatatttgtgagcccattgatgcttctggggaaacaggaaatatcttcacataaaaacgagacagaatctttctcagaaacgtcttggtgatgtgtgcattcatctcactgagttgaactttattttgattgagcagtttggaaacagtcttttctagtatctgcaaatggatattttaagcactctgaggcctacggtgaaaaaggaaatatcttcaatataaatcagacagaagcattcatagaaacttctttgtgatgtgtgcattcatctcaccgactagaacctttcttttgattgagcagttttgaaacactcttttagcggaatctgcaagtgtttatttggagcgcatgaggaatatggtggaaaaggaatcttcttcacatgaaaacgagacggaagcattctgagaaacttctctgtgatggatgcattcatttcacagagttaaacctttcctgtgattgagcggtttggaaacagtatttttttacaatctgcagaaggatacttgtgagccgattgaggtctatggggtgataagaaatatgttcacataaaaactagatagaaagtttctgagaaacttctttgtgatatttgcttttatctcctagagttgaaactttctttttattgagcagtttgggaacagtctttttgtagtatctgcaaatggatattaccagtgctttgaggcctatggtgaaaaaggaaatatcttcacataaaaacaaggcagaagcattctgagaagcttctttttcatgtctgcattcatctcgcagtgttgaaactttcttttgattgagcagttttgaaacgctctatttgtagtatctgcaagtggatatttggaacgctttgaggcctatagtggaaaaggaaatatcttcacataaaaaactagaaagaagaattctgagaaacttcctaggaaggtgtattttcgtctcacactgttaaacccgtcttttgattgagcagcttcgatacagccatttagtagaatatgaaagggtatatttgagagcccattgaggcctctggggaaataagaaatatcttcacctaaaaactagacaaaaactttctgagaaacacccttgtgatgtgtgcattcatcatacaaagttgaactttcttttgattgagcagtttggatacagtcatttgtattatctgtaaatggatatttggagtgtactgaggcctatggtgaaaaaggaaatatcctcacataaaattcagatggaagcattcttagaaactcctatgtgatgtgtgcattcatctcacagacttcaaactttctattgattgagcagttttgaaacactctttttgtagaatctgccagtggatatttggagcgctctgtggcccatagtggaaaaggaaatatcttcataaaaaaaataaacagaagcactttgagaaagttctctgtgttgtatgcagtcataaatcagacatgaaactttctttggtacagcagttttgaaacactctttttggagattctgaaagtagatatttggagagacttgaggactacggtggaaaaggaaatatcttcacaaaaaaactagacagaaacattctgagaagcttctttgtgatgtgtgcatccatctcaaagagttgaacctttcttttgattgaccatttttgaagcactctttttgtagaatcttcaagtggatatttggagtgtttgtggcctgtggtggaaaaggaaatatattcacataaaaactagatagaagcattctgagaaacttctttgtgatgtgctcattcaactcacagagttgagcttttcttttgattgagcagtttggaaacagtctttctgtagaatctgcaggtggatatttggagcgcattacggcctatagtggaaaaggaaatatattcacataaaaactagacagaagcattcagagaaacctctttgtgatgtgctcattcaactcacagagttgatcttttcttttgtttgagcagtttgcaaacagtctttttgtagaatctgcaagtggatattaggagtgcattacggcctatagtggagaatgaaatatcttcacataaaaactagacagaaacattatgagaaactgctctgtgatgcgtgcattcatcaccagggttgaacctttcttttgattgaacagttttgaaacactctttctgtagaatctgaaggggatatttggaacgccttgcggcctatggtgaaaaacgaaatatcttcacataaaaactagacagatgcattctgagaaagtgctttgtgaggtgtacattcatctcacagagttaaacctttcttttgattgagcagttttgaaacactcttattgtacaatctgcaagtggatatttggagagtttgaggccactggtggaaaagcaaatatcttcacataaaaactagacagaaccattctgagaaatctctttgagatgcgtgcattcaactcacagagttggacctttcctttgattgagcagtttggaaacagtctttttgcagtatatgcaaatggatatttggagcactttcaggcctatagtaggaaaggaaatatcttcacataaaaactagacagaaaattactgagaaacttcttaatgatgtgtgcattcatctcacagagttgaaactttcttttgattgagccgtttggaaacactcttttagtagaaactgcaaggagatatttggagcattttgtggtctatggtagaaaaggatatatcttcacataaaaatagaagcattttgaggaacttcatgatgtgtgcattcatctcaaagagttgaacttttcttttgattgagtagctttgaaaaactctttctgcagaatctgcaagttgatatttggagtgctttgtgacctatagtagaaaaggaaatatctttacttaaaactagacagaagcattctgagaaacttctttgtgatgtgtgcattcatctcacagagttgaatctttcttttgtttgagcagttttgaaactctctttctgtagaatcttcaagtggatattttcagcgctttgaggcctatggtggaaaagaaaatatcttcacataaaaagtagtcagaagcattctgagaaacttctttgtgacgtgtgcattcaactcatggagttcaacctttcttttgattcagcagtttggaaacagtctttttacagtatctgcaaatggatatttggagagctttgaggcctatggtggaaaaggaaatctcttcccataaaaactagacagctactttctgagaaactattttgtcatgtgtgacttctactcaccgggttgaaactttctgttgattgagcagtttggaaacagtctttttgtagaatctgcaaattgatatttggagcgcttttggcctacgttgaaaaacgaaatatcttcccataaaaagtaggcagaagttttggagaaatttattttgatgtgtgcattcatctcgcacagttgaaattttcttttgattgagcagtgtggatacattcgttttgtagagtctgcaagtggatatttggagcactttctggcctacagtgaaaaaggaaatatcttcacataaaaactagatagaagaattctgagaaacttcctttgaatgtgcacgttcatctcacagtgttgcactttttttttttgactgagcaccttctaaacagtcattttgtagaatatgcaaaggaatatttgtgagcccattgatgccactggggaattaggaaatatcttcacataaaaactagacagataatctttctcagaaacgtcttggtgatgtgtgcattcatctcactgagttgaactttattttgattgagcagtttggaaacagtcttttctagtatctgcaaatggatattttaagcactctgaggcctacggtgaaaaaggaaatatcttcaatataaatcagacagaagcattcatagaaacttctttgtgatgtgtgcattcatctcaccgactagaacctttcttttgattgagcagttttgaaacactcttttagcggaatctgcaagtgtttatttggagcacatgaggaatatggtggaaaaggaatcttcttcacataaaaacgagacggaagcattctgagaaatttttctgtgatgggtgcattcatttcacagagttgaacccttcctgtgattgaatggtttggaaacagtcgttttgtataagctgcagaaggatatttgtgagccgattgaggcctatggggcgataggaaatatgttcacataaaaaccagatagaaagtttctgagaaacttctttgtgatattagcttttatctcatagagttgaaaatttctttttattgagcagtttgggaacagtctttttgtagtatctgcaaatggatattaccagtgctttgaggcctatggtgaaaaaggaaatatcttcacataaaaacaaggcggaagcattctgagaaacttctttttgatgtctgcattcatctcacagagttgaacctttcttttgattgagcagttttgaaaggctctatttgtaggatctgcaagtggatatttggaacgctttgaggcctatagtggaaaacgaaatatcttcacataaaaacctagaaagaagaattctgagaaacttcctaggaaggtgtattttcgtctcacactgttaaacccgtcttttgattgagcagcttcgatacagccatttagtagaatatgaaagggaatatttgagagcccattgaggcctctggggaaataagaaatatcttcacctaaaaactagacaaaaactttctgagaaacacccttgtgatgtgtgcattcatcatacacagtggaacgttcttttgattgagcagtttggatacagtcatttgtattatctgtaaatggatatttggagtgtactgaggcctatggtgaaaaaggaaatatcctcacataaaattcagatggaagcattcttagaaactcctttgtgatgtgtacattcatctcacagacttcaaactttctattgattgagcagttttgaaacactctttttgtagaatctgccagtggatatttggagcgctctgtggcccatagtggaaaaggaaatatcttcataagaaaaataaacagaagcactttgagaaacttctctgtgttgtatgcagtcatatttcagacatgaaactttctttggtaccgcagttttaaaacactctttttggagattctgaaagtagatatttggagagacttgaggactacggtggaaaaggaaatatcttcacaaaaaaactagacagaaacattctgagaagcttctttgtgatgtgtgcatccatctcaaagagttgaacctttcttttgattgagcatttttgaagcactctttttgtagaaacttcaagtggatatttggagtgtttgtggcctgtggtggaaaaggaaatatattcacataaaaactagatagaaacattctgagaagcttctttgtgatgtgctcattcatctcacagagttgaacttttcttttgattgagcactttggaaacagtctttttgtagaatctgcaggtggatatttggagcacattacggcctatagtggaaaaggaaatatattcacataaaaactagacagaaacattctgagaaacttctttgtgatgtgctcattcaactcacagagttgaacttttcttttgtttgagcagtttgcaaacagtctttctgtagaatctgcaagtggatattaggagtgcattacggcctatagtggaaaatgaaataacttcacataaaaactagacagaaacattatgagaaactgctttgtgatgcgtgcattcatcaccagagttgagtttctcttttgattgaacagttttgaaacactctttctgtagaatctgaaagggatatttggagcgctttgcagcctatggtgaaaaaggaaatatcttcacataaaagctagacagaagcattttaagaaagtgctttgtgacgtgtgcattcatctcacagtgttgaacctttcttttgattgagcagttttgaaacactcttattgtagaatctgcaagtggatatttggagagtttgaggccactggtggaaaagcaaatatcttcacatcaaaactagtcagaatcattataagtaatctctttgagatgcgtgcattcaactcacagagttggacatttcctttgattgagcagtttggaaacagtctttttgcagtatctgcaaacggatatttggagcactttcaggcctatagtaggaaaggaaatatcttcacataaaaaccatacagaaaattactgagaaacttgttagtgatgtgtgcattcatctcacagagttgaaactttcttttgattgagcagtttggaaacactcttttagtagaaactgcaaggggatatttggagcactttgcggtctttggtagaaaaggatatatcttcacataaaaaatagacagaagcattctgaggaacttcttaatgatgtgtgcattcgtctcacagagttgaacttttcttttgattgagagcttgaaaaactctttctgcagaatctgcacgttgatatttggagtgctttgaggcctacagtggaaaaggaaatatattcacataaaactagacagaagcattctgagaaacttctttgtgatgtgtgcattcatctcacagagttgaatctttcttttgtttgagcagttttgaaactctctttctgtagaatcttcaagtggatattttcagcgctttgaggcctatggtggaaaagaaaatatcttcacataaaaactagtcagaagcattctgggaaatttttgtgacgtgtgcattcaactcatggagttcaacctttcttttgattcagcagtttggaaacagtctttttacagtatctgcaaatggctatttggagagctttgaggcctatggtggaaaaggaaatatcttcccataaaaactagacagcagcattctgagaaacttatttgtgatctgtgcattcatctcacagagttgaacctttcttttgattcagcagttttgaaactgtcgttttgtagaatctgcaaattgatatttggagtgcttttgacctacgttgaaaaacgaaatatcttcccataaaaagtaggcagatactttctgagaaactattttgtcatgtgtgacttctactcaccgggttgaaactttctgttgattgagcagtttggaaacagtctttttgtagaatctgcaaattgatatttggagtgcttttggcctacgttgaaaaactaaatatcttcccataaaaagtaggcagaagttttggagaaatttattttgatgtgtgcattcatctcacacagttgaaattttcttttgattgagcagtgtggatacactcgtttcgtagagtctgcaagtggatatttggagcactttgtggcctatagtgaaaaaggaaatatcttcacataaaaactagatagaagaattctgagaaacttcctttgaatgggcgcattcatctcacactgttgaactttttttttgattgagcaccttctaaagagtcattttgtagaatctgcaaaggaatatttgtgagcccattgatgcctctggggaaacaggaaatatcttcacataaaaacgagacagaatctttctcagaaacgtcttggtgatgtgtgcattcatctcactgagttgaactttaatttgattgagcagtttggaaacagtcttttctagtatctgcaaatggatattttaagcactctgaggcctacggtgaaaaaggaaatatcttcaatataaatcagacagaagcattcatagaaacgtctttgtgatgtgtgcattcatctcaccgactagaacctgtcttttgattgagcagttttgaaacactcttttagcggaatctgcaagtgtttctttggagcgcatgaggaatatggtggaaaaggaatcttcttcacataaaaacgagacggaagcattctgagaaacttctctgtgatggatgcattcatttcacagagttaaacctttcctgtgattgagcggtttggaaacagtagatttttataatctgcagaaggatacttgtgagccgattgaggtctatggggtgataagaaatatgttcacataaaaactagatagaaagtttctgagaaacttctttgtgatatttgcttttatctcctagagttgaaactttctttttattgagcagtttgggaacagtctttttgtaatatctgcaaatggatattaccagtgctttgaggcctatggtgaaaaaggaaatatcttcacataaaaacaaggcggaagcattctgagaaagtttttttgatgtctgcattcatctcacagagttgaacctttcttttgattgagcagttttgaaacgctctatttgtagtatctgcaagtggatatttggaacgctttgaggcctatagtggaaaaggaaatatcttcacataaaaaactagaaagaagaattctgagaaacttcctaggaaggtgtattttcgtctcacactgttaaacccgtcttttgattgagcagcttcgatacagtcatttagtagaatatgaaagggaatatttgagagcccattgaggcctctggggaaataagaaatatcttcacctaaaaacaagacaaaaactttctgagaaacacccttgtgatgtgtgcattcatcatacacagttgaactttcttttgattgagcagtttggatacagtcatttctattatctgtaaatggatatttggagtgtactgaggcctatggtgaaaaaggaaatatcctcacataaaattcagatggaagcattcttagaaactcctatgtgatgtgtgcattcatctcacagacttcaaactttctattgactgagcagttttgaaacactctttttgtagaatctgccagtggatatttggagcgctctgtggcccatagtggaaaaggaaatatcttcataaaaaaaataaacagaagcactttgagaaacttctctgtgttgtatgcagtcatatctcagacatgaaaatttctttggtacagcagttttaaaacactctttttggagattctgaaagtagatatttggagagacttgaggactacggtggaaaaggaaatatcttcacagaaaaactagacagaaacattctgagaagcttctttgtgatgtgtgcatccatctcaaagagttgaaactttcttttgattgagcatttttgaagcactctttttgtagaatcttcaagtggatatttggagtgtttgtggcctgtggtggaaaaggaaatatattcacataaaaactagatagaagcattctgagaaacttctttgtgatgtgctcattcaactcacagagttgagcttttcttttgattgagcagtttggaaacagtctttttgtagaatctgcaggtggatatttggagcgcattacggcctatagtggaaaaggaaatatattcacataaaatctagacagaagcattctgagaaacttctttgtgatgtgctcattcaactcacagagttgaacttttcttttgtttgagcagtttgcaaacagtctttttgtagaatctgcaagtggatattaggagtgcattacagcctatagtggagaatgaaatatcttcacataaaaactagacagaaacattatgagaaactgctttgtgatgcgtgcattcatcaccagagttgagtttctcttttgattgaacagttttgaaatactctttctgtagaatctgaaagggatatttggagcgctttgcagcctatggtgaaaaaggaaatatcttcacataaaagctagacagaagcattctaagaaagtgctttgtgacgtgtgcattcatctcacagtgttgaacctttcttttgattgagcagttttgaaacactcttattgtagaatctgcaactggatatttggagagtttgaggccactggtggaaaagcaaatatcttcacatcaaaactagacaggatcattataagtaatctctttgagatgcgtgcattcaactcacagagttggacatttcctttgattgagcagtgtggaaacagtctttttgcagtatctgcaaacggatatttgcagcactttcaggcctatagtaggaaaggaaatatcttcacataaaaactagacagaaaattactgagaaacttcttaatgatgtgtgcattcatctcacagagttgaaactttcttttgattgagccgtttggaaacactcttttcgtagaaactgcaaggggatatttggagcgttttgtggtctatggtagaaaaggatatatcttcacataaaaatagaagcattctgaggaacttcatgatgtgtgcattcatctcaaagagttgaacttgtcttttgactgagcagctttgaaaaactctttctgcagaatctgcaagttgatatttggaatgctttgtggcctatagtagaaaaggaaatatctttacataaaactagacagaagcattctgagaaacgtctttgtgacgtgtgcattcatgtcacagagttgaacctttcttttgtttgagcagttttgaaaccctctttttgtagaatcttcaagtggatatttttagcactttggggcctatggtggaaaagaaaacatcttcacataaaaactagtcagaagcattctgagaaacttctttgtgacgtgtgcattcaactcatggagttcaacctttcttttgattcagcagtttggaaacagtctttttacagtatctgcaaatggctatttggagagctttgaggcctatggtggaaaaggaaatctcttcccataaaaactagacagctactttctgagaaactattttgtcatgtgtgacttctactcaccgggttgaaactttctcttgattgagcagtttggaaacagtctttttgtagaatctgcaaattgatatttggagtgcttttggcctacgttgaaaaacgaaatatcttcccataaaaagtaggcagaagttttggagaaatttattttgatgtgtgcactcatctcacacagttgaaattttcttttgattgagcagtgtggatacactcgttttgtagagtctgcaagtggatatttggagcactttgtggcctatagtgaaaaaggaaatatcttcacataaaaactagatagaagaattctgagaaacttcctttgaatgggcgcattcatctcacactgttgaactttttttttgattgagcaccttctaaacagtcattttgtagaatatgcaaaggaatatttgtgagcccattgatgcctctggggaaacaggaaatatcttcacataaaaacgagacagaatctttctcagaaacgtcttggtgatgtgtgcattcatctcactgagttgaactttactttgattgagcagtttggaaacagtcttttctagtatctgcaaatggatattttaagcattctgaggcctacggtgaaaaaggaaatatcttcaatataaatcagacagaagcattcatagaaactgctttgtgatgtgtgcattcatctcaccgactagaacctttcttttgattgagcagttttgaaacactcttttagcggaatctgcaagtgtttatttggagcgcatgaggaatatggtggaaaaggaatattcttcacatggaaacgagacggaagcattctgagaaacttctctgtgatggatgcattcatttcacagagttaaacctttcctgtgattgagcggtttggaaacagtagtttttcataatctgcagaaggatacttgtgagccgattgaggtctatggggtgataagaaatatgttcacataaaaactagatagaaagtttctgagaaacttctttgtgatatttgcttttatctcatagagttgaaactttctttttattgagcagtttgggaacagtctttttgtagtatctgcaaatggatattaccagtgctttgaggcctatggtgaaaaaggaaatatcttcacataaaaacaaggcagaagcattctgagaaacttctttttgatgtctgcattcatctcacagagttgaacctttcctttgattgagcagttttgaaacgctctatttgtagtatctgcaagtggatatttggaacgctttgaggcctatagtggaaaaggaaatatcttcacataaaaaactagaaagaagaattctgagaaacttcctaggaaggtgtattttcgtctcacactgttaaacccctcttttgattgagcagcttcgatacagtcatttagtagaatatgaaagggaatatttgagagcccattgaggcctctggggaaataagaaatatcttcacctaaaaactagacaaaaactttctgagaaacacccttgtgatgtgtgcattcatcatacacagttgaactttcttttgattgagcagtttggatacagtcatttgtattatctgtaaatggatatttggagtgtattgaggcctatggtgaaaaaggaaatatcctcacataaaattcagatggaagcattcttagaaactcctttgtggtgtgtgcattcatctcacagacttcaaactttctattgattgagcagttttgaaacactctttttgtagaatctgcaagtcgatatttggagcgctctgtggcccatagtggaaaaggaattatcttcataaaaaaaataaacagaagcactttgagaaacttctctgtgttgtatgcagtcatatctcagacatgaaactttctttggtacagcagttttaaaacactctttttggagattctgaaagtagatatttggagagacttgaggactacggtggaaaaggaaatatcttcacaaaaaaactagacagaaacattctgagaaagcttctttgtgatgtgtgcatccatctcaaagagttgaacctttcttttgattgagcatttttgaagcactctttttgtagaaacttcaagtggatatttggagtgtttgtggcctgtggtggaaaaggaaatatattcacataaaaactagatagaagcattctgagaaacttctttgtgatgtgctcattccactcacagagttgagcttttcttttgattgagcagtttggaaacagtctttttgtagaatctccaggtggatatttggagcgcattacggcctatagtggaaaaggaaatatattcacataaaaactagacagaagcattctgagaaacttctttgtgatgtgctcattcaactcacagagttgaacttttcttttgtttgagcagtttgcaaacagtctttctgtagaatctgcaagtggatattaggagtgcattacggcctatagtggaaaatgaaatatcttcacataaaaactagacagaaacattatgagaaactgctttgtgatgcgtgcattcattaccagagttgaatttctcttttgattgaacagttttgaaacactctttctgtagaatctgaaagggatatttggagcgctttgcagcctatggtgaaaaaggaaatatcttcacataaaagctagacagagcattctaagaaagtgctttgtgacgtgtgcattcatctgacagtgttgaacctttcttttgattgagcagatttgaaacactcttattgtagaatctgcaactggatatttggagagtttgaggccactggtggaaaagcaaatatcttcacatcaaaactagacaggatcattataagtaatctctttgagatgccgtgcattcaactcacagagttggacatttcctttgattgagcagtttggaaacagtctttatgcagtatctgcaaacggatatttggagcactttcaggcctatagtaggaaaggaaatatcttcacataaaaaccatacagaaaattactgagaaacttcttaatgatgtgtgcattcatctcacagagttgaaactttcctttgattgagcagtttggaaacactcttttagtagaaactgcaaggggatatttggagcgttttgtggtctatggtagaaaaggttatcttcacataaaaatagaagcattctgaggaacttcctgatgtgtacattcatctcaaagagttgaacttttcttttgattgagcagctttgaaaaactctttctgcagaatctgcaagttgatatttggagtgctttgtggcctatagtagaaaaggaaatatctttacataaaactagacagaagcattctgagaaacttctttgtgatgtgtgcattcatctcacggagttgaatctttcttttgtttgagcagttttgaaactctctttctgtagaatcttcaagtggatattttcagcgctttgaggcctatggtggaaaagaaaatatcttcacataaaaactagtcagaaccattctgagaaacttctttgtgacgtgtgcattcaactcatggagttcaacctttcttttgattcagcagtttggaaacagtctttttacagtatctgcaaatggctatttggagagctttgaggcctatggtggaaaaggaattatcttcccataaaaactagacagcagcattctgagaaacttatttgtgatctgtgcattcatctcccagagttgaacctttcttttgattcagcagttttgaaactgtcgttttgtagaatctgcaaaggaatatttgtgagcccattgaggcttctggggtgataggaaatatcttcacgtaaaaactagacagatactttctgagaaactattttgtcatgtgtgtcttctactcaccgggttgaaactttctgttgattgagcagtttggaaacagtctttttgtagaatctgcaaattgatatttggagtgcttttggcctacgttgaaaaacgaaatatcttcccataaaaagtaggcagaagttttggagaaagttattttgatgtgtgcattcatctcacacagttgaaattttcttttgattgagcagtgtggatacactcgttttgtagagtctgcaagtggatatttggagcactttgtggcctatagtgaaaaaggaaatatcttcacataaaaactagatagaagaattctgagaaacttcctttgaatgggcgcattcatctcacactgttgaactttttttttgattgagcaccttctaaacagtcattttgtagaatatgcaaaggaatatttgtgagcccattgatgccttctggggaaacaggaaatatcttcacataaaaacgagacagaatctttctcagaaacgtcttggtgatgtgtgcattgatctcactgagttgaactttactttgattgagcagtttggaaacagtcttttctagtatctgcaaatggatattttaagcactctgaggcctacggtgaaaaaggaaatatcttcaatataaatcagacagaagcattcatagaaacttctttgtgatgtgtgcattcatctcaccgactagaacctttcttttcattgagcagttttgaaacactcttttagcggaatctgcaagtgtttatttggagcgcatgaggaatatggtggaaaaggaatcttcttcacataaaaacgagacggaagcattctgagaaacttctctgtgatggatgcattcatttcacagagttaaacctttcctgtgattgagcggtttggaaacagtagttttttacaatctgcagaaggatacttgtgagccgattgaggtctatggggtgataagaaatatgttcacataaaaactagatagaaagtttctgagaaacttctttgtgatattagcttttatctcctagagttgaaaatttctttttattgagcagtttgggaacagtctttttgtagtatctgcaaatggatattaccagtgctttgaggcctatggtgaaaaaggaaatatcttcacataaaaacaaggcggaaggattctgagaaacttctttgtgatgtctgcattcatctcacaaagttgaacctttcttttgattgagcagttttgaaacactctctttgtagtatctgcaagtggatatttggaacgctttgaggcctatagtggaaaaggaaatatcttcacataaaaaactagaaagaagaattctgagaaacttcctaggaaggtgtattttcgtctcacactgttaaacccgtcttttgattgagcagcttcgatacagtcatttagtagaatatgaaagggaatatttgagagcccattgaggcctctggggaaataagaaatatcttcacctaaaaactagacaaaatctttctgagaaacacccttgtgatgtgtgcattcatcatacagagttgaaatttcttttgattgagcagtttggatacagtcatttgtattatctgtaaatggatatttggagtgtactgaggcctatggtgaaaaaggaaatatcctcacataaaattcagatggaagcattcttagaaactcctttgtgatgtgtgcactcatctcacagacttcaaactttctattgattgagcagttttgaaacactctttttgtagaatctgccagtggatatttggagcgctctgtggcccatagtggaaacggaaatatcttcataaaaaaaataaacagaagcactttgagaaacttctctgtgttgtatgcagtcatatctcagacatgaaaatttctttggtacagcagttttaaaacactctttttggagattctgaaagtagatatttggagagacttgaggactacggtggaaaaggaaatatcttcacaaaaaaactagacagaaacattctgagaagcttctttgtgatgtgtgcgtccatctcgaagagttgaacctttcttttgattgcgcatttttgaggcactctttttgtagaatcttcaagtggatatttggagggtttgtggcctgtggtggaaaagcaaatatattcacataaaaactagatagaagcattctgaggaacttctttgggatgtgctcattcacctcacagagttgagcttttcttttgattgagcagtttggaaacagtctttttgtagaatctgcaagtggatatttggagcgcatgacggcctatagtggaaaaggaaatatattcacataaaaactagacagagaagcattctgagaaacttctttgtgatgtgctcattcaactcacagagttgaacttttcttttgtttgagcagtttgcaaacagtctttctgtagaatctgcaagtggatattaggagtgcattacggcctatagtggaaaatgaaatatcttcacataaaaactagacagaaacattatgagaaaccgctttgtgatgcgtgcattcatcaccagagttgagtttctcttttgattgaacagttttgaaacactctttctgtagaatctgaaagggatatttggagcgctttgcagcctatggtgaaaaaggaaatatcttcacataaaagctagacagaagcattctaagaaagtgctttgtgacgtgtgcattcatctgacagtgttgaacctttctttcgattgagcagttttgaaacactcttattgtagaatctgcaagtggatatttggagagtttgaggccactggtggaaaagcaaatatcttcacatcaaaactagacaggatcattataagtaatctctttgagatgcgtgcattcaactcacagagttggacatttcctttgattgagcagtttggaaacagtctttatgcagtatctgcaaacggatatttggagcactttcaggcctatagtaggaaaggaaatatcttcacataaaaaccatacagaaaaattactgagacactacttaatgttgtgtgcattcatctcacagagttgaaactttcttttgattgagccgtttggaaacactcttttagtagaaactgcaaggggatatttggagcgttttgtggtctatggtagaaaaggatatatcttcacataaaaatagaagcattctgaggaacttcatgatgtgtgcattcatctcaaagagttgaacttttcttttgattgagcagctttgaaaatctctttctgcagaatctgcaagttgatatttggagtgctttgtggcctatagtagaaaaggaaatatctttacataaaactagacagaagcattctgagaaacttctttgtgatgtgtgcattcatctcacagagttgaatctttcttttgtttgagcagttttgaaactctctttttgtagaatcttcaagtggatattttcagcgctttgaggcctatggtggaaaagaaaatatcttcacataaaaactagtcagaagtattctgagaaacttctttgtgacgtgtgcattcaactcatggagttcaacctttcttttgattcagcagtttggaaacagtctttttacagtatctgcaaatggctatttggagagctttgaggcctatggtggaaaaggaaatctcttcccataaaaactagacagcagcattctgagaaacttatttgtgatctgtgcattcatctcacagaattgaacctttcttttgattcagcagttttgaaactgtcgttttgtagaatctgcaaaggaatatttgtgagcccattgaggcttctggggtgataggaaatatcttcacattaaaactagacagatactttctgggaaactattttgtcatgtgtgacttctactcaccgggttgaaactttctcttgattgagcagtttggaaacagtctttttgtagaatctgcaaattgatatttggagtgcttttggcctacgttgaaaaacgaaatatcttcccataaagagtaggcagaagttttggagaaatttattttgatgtgtgcattcatctcaaacagttgaaattttcttttgtttgagcagtgtggatacactcgtttcgtagagtctgcaagtggatatttggagcactttgtggcctatagtgaaaaaggaaatatcttcacataaaaactagatagaagaattctgagaaacttcctttgaatgggcgcattcatctcacactgttgaactttttttttgattgggcaccttctaaacagtcattttgtagaatatgcaaaggaatatttgtgagcccattgatgcctctggggaaacaggaaatatcttcacataaaaacgagacagaatctttctcagaaacttctttgtgatatgtgcattcatctcactgagttgaactttattttgattgagcagtttggaaacagtctttttctagtatctgcaaatggatattttaagcgctctgaggcctacggtgaaaaaggaaatatcttcaatataaatcagacagaagcattcatagaaacttctttgtgatgtgtgcattcatctcaccgactagaacctttcttttgattgagcagttttgaaacactcttttagcggaatctgcaagtgtttctttgtagcgcatgaagaatatggtggaaaaggaatcttcttcacataaaaacgagacggaagcattctgagaaacttctctgtgatggatgcattcatttcccagagttaaacctttcctgtgattgaccggtttggaaacagtagttttttacaatctgcagaaggatacttgtgagccgattgaggtctatggggtgataagaaatatgttcacataaaaactagatagaaagtttctgagaaacttctttgtgatatttgcttttatctcctagagttgaaactttctttttattgagcagtttggggacagtctttttgtagtatctgcaaatggatattaccagtgctttgaggcctatggtgaaaaaggaaatatcttcacataaaaacaaggcagaagcattctgagaagcttctttttgatgtctgcattcatctcgcagtgttgaaactttcttttgattgagcagttttgaaacgctctatttgtagtatctgcaagtggatatttggaacgctttgaggcctatagtggaaaaggaaatatcttcacataaaaaactagaaagaagaattctgagaaacttcctaggaaggtgtatttttgtctcacactgttaaacccgtcttttgattgagcagcttcgatacagtcatttagtagattatgaaaaggaatatttgagagcccattgaggcctctggggaaataagaaatatcttcacctaaaaactagacaaaatctttctgagaaacacccttgtgatgtgtgcattcatcatgcacagttgaactttcttttgattgagcagtttggatacagtcatttgtattatctgtaaatggatatttggagtgtattgaggcctatggtgaaaaaggaaatatcctcacataaaattcagatggaagcattcttagaaactcctttgtgatgtgtgcactcatctcacagacttcaaactttctattgattgagcagttttgaaacactctttttgtagaatctgccagtggatatttggagcgctctgtggcccatagtggaaaaggaaatatcttcataaaaaaaataaacagaagcactttgagaaacttctctgtgttgtatgcagtcataactcagacatgaaactttctttggtacagcagttttaaaacactctttttggagattctgaaagtagatatttggagagacttgaggactacggtggaaaaggaaatatcttcacaaaaaaactagacagaaacattctgagaagcttctttgtgatgtgtgcgtccatatcgaagagttgaacctttcttttgattgagcatttttgaagcactctttttgtagaatcttcaagtggatatttggagggtttgtggcctgtggtggaaaaggaaatatattcacataaaaactagatagaagcattctgagaaacttctttctgatgtgctcattcaactcacagagttgagcttttcttttgattgcgcagtttggaaacagtctttttgtagaaactgcaagtggatatttggagcgcattacggcctatagtggaaaaggaaatatattcacataaaaactagacagaagcattctgagaaacttctttgtgatgtgctcattcaactcacagagttgaacttttcttttgtttgagcagtttgcaaacagtctttttgtagaatctgcaagtggatattaggagtgcattacggcctatagtggagaatgaaatatcttcacataaaaactagacagaaacattatgagaaactgctttgtgatgcgtgcattcatcaccagagttgagtttctcttttgattgaacagttttgaaacactctttctgtagaatctgaaaggggtatttggagcgctttgcagcctatggtgaaaaaggaaatatcttcacataaaagctagacagaagcattctaagaaagtgctttgtgacgtgtgcattcatctcacagtgttgaacctttcttttgattgagcagttttgaaacactcttattgtagaatctgcaagtggatatttggagagtttgaggccactggtggaaaagcaaatatcttcacatcaaaactagacagaatcattagaagtaatctctttgagatgcgtgcattcaactcacagagttggacatttcctttgattgagcagtgtggaaacagtgtttttgcagtatctgcaaacggatatttgcagcactttcaggcctatagtaggaaaggaaatatcttcacataaaaactagacagaaaattactgagaaacttcttaatgatgtgtgcattcatctcacagagttgaaacttcttttgattgagcagtttggaaacactcttttagtagaaactgcaaggggatatttggagcgttttgtggtctatggtagaaaaggatatatcttcacataaaaatagaagcattctgaggaacttcatgatgtgtgcattcatctcaaagagttgaacttttcttttgattgagcagctttgaaaaactctttctgcagaatctgcaagttgatatttggagtgctttgtggcctatagtagaaaaggaaatatctttacataaaactagacagaagcattctgagaaacttctttgtgatgtgtgcattaatgtcacagagttgaacctttcttttgtttgagcagttttgaaactctctttttgtagaatcttcaagtgaatatttttagcactttgaggcctgtggtggaaaagaaaacatcttcacataaaaactagtcagaaactttctgagaaacttctttcagatgtgtgctttcatctcacagatttgaacttttcttttgattgagcagttttgaaacagtctttttgtacaatctataagtggatatttggggcactttcaggcctatggtggaaaaagacacatcttcccataaaaactagacagcagcattctgagaaacttatttgtgatctgtgcattcatctcacagagttgaacctttcttttgattcagcagttttgaaactgtcgttttgtagaatctgcaaaggaatatttgtgagcccattgaggcttctggggtgataggaaatatcttcacataaaaactagacagatacttcctgagaaactattttgtcatgtgtgacttctactcaccgggttgaaactttctcttgattgagcagtttggaaacagtctttttgtagaatctgcaaattgatatttggagtgcttttggcctacgttgaaaaacgaaatatcttcccataaaaagtaggcagaagttttggagaaatttattttgatgtgtgcattcatctcacacagttgaaattttcttttgattgagcagtgtggatacactcgttttgtagagtctgcaagtggatatttggagcactttgtggcctacagtgaaaaaggaaatatcttcacataaaaagtagatagaagaattctgagaaacttcctttgaatgggcgcattcatctcacactgttgaactttttttttgattgagaaccttctaaacagtcattttgtagaatatgcaaaggaatatttgtgagcccattgatgcctctggggaaacaggaaatatcttcacataaaaacgagacagaatctttctcagaaacgtcttggtgatgtgtgcattcatctcactgagttgaactttactttgattgagcagtttggaaacagtcttttctagtatctgcaaatggatattttaagcactctgaggcctacggtgaaaaaggaaatatcttcaatataaatcagacagaagcattcatagaaacttctttgtgatgtgtgcattcatctcaccgactagaacctttcttttgattgagcagttttgaaacactcttttagcggaatctgcaagtgtttatttggagcgcatgaggaatagggtggaaaaggaatcttcttcacataaaaacgagacggaagcattctgagaaacttctctgtgatggatgcattcatttcacagagttaaacctttcctgtgattgagcggtttggaaacagtagtttttttacaatctgcagaaggatacttgtgagccgattgaggtctatggggtgataagaaatatgttcacataaaaactagatagaaagtttctgagaaacttctttgtgatatttgcttttatctcatagagttgaaaatttctttttattgagcagtttgggaacagtctttttgtagtatctgcaaatggatattaccagtgctttgaggcctatggtgaaaaaggaaatatcttcacataaaaacaaggcagaaggattctgagaaacttctttttgatgtctgcattcatctcacagagttgaacctttcctttgattgagcagttttgaaacgctctatttgtagtatctgcaagtggatatttggaacgctttgaggcctatagtggaaaaggaaatatcttcacataaaaaactagaaagaagaattctgagaaacttcctaggaaggtgtattttcgtctcacactgttaaacccgtcttttgattgagcagcttcgatacactcatttagtagaatatgaaagggaatatttgagagcccattgaggcctctggggaaataagaaatatcttcacctaaaaactagacaaannnnnnnnnnnnnnnnnnnnnnnnnnnnnnnnnnnnnnnnnnnnnnnnnnnnnnnnnnnnnnnnnnnnnnnnnnnnnnnnnnnnnnnnnnnnnnnnnnnnagcattccaagaaattttttgtgatgtgtccatttacgtcacagagttgaacctctcctttgattgggcagtttggaaacagtctttttgtagaacctgcagagggatatttgtgagccctttatggcctgtagtgaaatacgaagtatcttcacctaaaaactagacagaaggtttctgagaaacttcttggtgatgtgtgccttcatctcacagtgttgaacctttcttttgattgagcagtttgcaaagtctttctgtagaatctgtaaatggatatttggagatatttgaggcccgtggtgaaaaaggaagtatcttcacctaaaaaccagacagaaagatttctgaaaaacctctttgttatgtgtgaattcatgtcacagaattcaacctttctttcacttgagcagtttggaaacagtctttggtagaagatgcagagggaaatttcttagctgcttcaggcctatggtgaaaaagaaatatcttcacagaaaaactagacagaagctttctgagaaacttctttgtgatgtgtccattcatcgcacagagtgaaacctttcttttgattgaggagtttggaaaaggtcttttcttagaatctgcaaagggatatttgtgagccctttatggcctttgttgaaatatgaaatatcttcacgtaaaaagtagacagaagctttctgacaaatttcttggtgatgtgcacgtttgtcacacggaattgaacccttcttctgattgagcagtttggaatcagtctttttgtagaatctgtgaatgtgtatttagagagttttaaggcctagggtgcaagaggcaatgtcttcacataaaaacgacacagtagcattttgagaaaactctttgtgacatttccattcatctctaatagttggccgtttcctttcattgagcagtttggaagcagtctttttctacaacctgcaaagggatatttctgagcggtttggggccaacggtgaaaaataaatatcttcccatgaaaactagacagaagcattttgagaaacttctttttgatgtgtgtattcatctcacagatttgaacctttctttagatttagcaatttggagaaagtctcttggtagtataagtggagttatatttgcgagcggtttaaggcctatggtgccaaaggaaataccttcacataaaatgcagacagaggctttccgagaaacttctttgtgatgtgtgctttcgtctcacagagttgtgcctttcttttgattgaccagtttgggaacattctttttgtagaatctgcaaatggatatttggagcaatttgtggcctacggtgaaaaaggaaatatcttcacagaaaaactagacaggcagactcctgagaaacttctttttgatgagtgcattcatttcacatagttgaaacatgccataggggccagtttggaaacagtcttttggtagagtctgcagacagatatttttgagtggcttaaagactatggtgaaaaaggaaacatcttcacatagcaaccagacagaagcaacctgagaaacttctttgggatgtgttcattcatctcacaatgttgaacgtttcttttgattgagaagtttgtaaagagaacttttgtagaatccgcaaagagatatgtgtgagtcccttgattcctatggcaaaataggaattatcttgagataaaagcgagacagaagatttctgagaaacttttttgtgatgtgtgctttcatctcacagagttgaaaatttcttttgattgagtagtttggaaacagtcttttcgtatcatctgcaaacggatgtttggagcgctttgtggcctaaggtgaaaatggaaacatcttcacataaaaactagacagaagaattctgaggaacctctttatgatgtgtgcattcatctcagatgggtgaaattttcttttgatggagcagtttggaaacagtctttttctagtatctgcagaaggatatttgtgagcggtgtaaggcctatggtgaaaaaggaaatatcttcacataaaaaccagacagaagccttctgaggaacttctttgtgatgtgtgcgttcatctcaccgtgttgaaactttattttatttgagcagtttagagacagtgtttctctgcaatctgcaaaggtctaactctgagccctttgaggtctatggtgaaaaagaaatgtcttcacatttaaactagacagaagcattctgaggaacttcgttgtgatgcctccattcatctgacagagttgaagctttcttctaattcagcactttggaaggcatatttttgtagaatctgcaaagggatattttttagacttttgaagcctatagtgaaatagtaaatatcttcccatgaaaactagacaggagaattctgagaaacttcattctgacgtgggcattaacctcagagaatttaaccttccttttgattgagaagtatggaaacggtcgtcttttagaatctggaaagggatatttcttagccctttgaggcctacggtgaaactggaaatatcttcacatgaaaagtagaccgaaagctttcggagaaacttctttgagatgtgtgctttcacctcacagagttaaacactttcttttgatggagcagtttggaaacactctttctgtgacatctgtaaatggatattaggagtgctttgaggccaatggtgacaaaggaagtatcttcacataaaaactacacagaagttttctgagaaactactttttgatgtgtccactaatcgaacagagttaaaactttctttttattgagcagtttggatacagtgttttcggagaatctgcaaaaaacatttgtgagccctttattgcctatggtgaaataggaatcttcttcacatgtaaactagacagaagctttctgaggaacgtcttcgtgacgtgtgcattcgtctcacatagttgaaactttctttggattgagcagttttgaaacagtccttttgtaggatctgcaaggggatatttctgagcccattgagtactgtgatgcaatgtgaagtatcttcacataaaaactagacagacgctttctaagaaacttcgttgtgatgtgtgctttcatcgcacagaattgaagctatcctttgattgaggagtttggaaacactctttttctagaatctgcaaatggatatttggagagcttttgaggcccgtggtgaaaaacgaaatatcttcacgtaaaaactaaacagaagctttctgagaaactcccttgcgatgtgtgcattcacctcaccgagtggaaactttcttttgattgagcagattggaaagaggcttatcgtacaacctgcaaagggagaattctgatccgtttgaggcttatggtgaaagagaaatatcttcccatcaaaactagacggaaggattccaagaaattttttgtgatgtgtccgtttacgtcacagagttgaacctctccttctattgggcagtttgggaacagtctttttgtagaacctgcagagggatatttgtgagccctttatggcctgtggtgaaatacgaagtatcttcacctaaaaactagacagaaggtttctgagaaacttcttggtgatgtgtgccttcatctcacagtgttgaacctttcttttgatggagcagtttggaaagtctttctgtagaatctgcaaatggatatttggagatatttgaggcccgtggtgaaaaaggaagtatcttcacctaaaaaccagacaggagatttctgaaaaacctctttgtgatgtgtgaattcatgtcacagaattcaaccttcctttcagttgagcagtttggaaccagtcttttgtggaagctgcagagggaaatttcttagctgcttgaggcctatggtgaacaagaaatagcctcacataaaaagtagacagaagctttctgagaaacttcttcgtgatgtgtccattcatctcacagagttaaacctttcttttggttgaggagtttggaaaacgtcttttcttagaatctgcgaagggatatttgtgagccctttatggcctttgttgaaatatgaaatatcttcacataaaaagtagacagaagctttctgacaaatttccttggtgatgtgcacgtttgtcacacggaattgaacccttcttctgattgagcagtttggaatcagtctttttgtagaatctgtgaatgtgtattgagagagttttaaggcctagggtgccaaaggcaatgtcttcacataaaaacgacacagtagctttttgagaaaactcttagtgacatttccattcatctctaatagttggccgtttcctttcattgagcagtttggaagcagtctttttctacaaactgcaaagggatatttctgagcggtttggggccaacggtgaaaaataaatatcttcccatgaaaactagacagaagcattttgagaaacttctttttgatgtgtgtattcatctcacagagttgaacctttctttagatttagcaatttggagaaagtctcttggtagtataagtggagttatatttgcgagcggtttaagtcctacggtgccaaaggaaataccttcacataaaatgcagacagaggctttccgagaaacttctttgtgatgtgtgctttcgtctcacacagttgcgcctttctgttgattgaccagtttgggaacattctttttgtagaatctgcaaatggatatttggagcaatttgtggcctacggggaaaaaggaaatatcttcacataaaaactagacaggagaatcctgagaaacttctttttgatgagtgcattcatttcacatagttgaaacatgctatatgggccagtttggaaacagtctttttgtagagtctgcagacaggtatgtttgagtggcttaaagaccacggtgaaaaaggaaacatcttcacatagcaaccagacagaagcaacctgagaaacttctttgggatgtgttcattcatctcacaatgttgaacgtttcttttgattgagaagtttgtaaagagaacttttgtagaatccgcaaagggatatgtgtgagccccttgattcctatggcaaaataggaattatcttgagataaaagcgagacagaagatttctgagaaacttttttgtgatgtgtgctctcatctcacagagttgaaaatttcttttgattgagcagtttggaaacagtcctttcgtatcatctgcaaacggatgtttggagcgctttgtggcctaaggtgaaaatggaaacatcttcacataaaaactagacagaagaattctgaggaacttctgtatgatgtgtgcattcatctcagataggtgaaattttcttttgatggagcagtttggaaacagtctttttatagtatctgcagaaggatattcgtgagcggtgtaaggcctatggtgaaaaaggaaatatcttcatattaaaaccagacagaaagctttctgaggaacttctttgtgatgtgtgcattcatctcaccgtgttgaaactttattttatttgagcagtttagagacagtctttctctgcaatctgcaaaggtctaattctgagccctttgaggtctatggtgaaaaagaaatatcttcacatttaaactagacagaagcattctgaggaacttctttgtgatgtctccattcatctgacagagttgaaggtttcttttaattcagcactttggaaggcatatttttgtagaatctgcaaagggatatttttgagacatttgaagcctatagtgaaatagtaaatatcttcacatgaaaactagacaggagagttctgagaaacttcattctgatgtgtgcattaacctcacagaatttaacctttcttttgattgagaagtatggaaatggtggtcttttagaatctggaaagggatatttcttagccctttgaggcctatggtgagactggaaatatcatcacatgaaaactagaccgaagctttcggacaaacttctttgagatgtgtgctttcacctcacagagttaaacactttcttttgattgagcagtttggaaacactctttctgtgacatctgtaaatggatattaggagtgctttgaggccaatggtgacaaaggaagtatcttcacataaaaagtacacagaagttttctgagaaactactttttgatgtgtccattaacctaacagagttaaaactttctttttattgagcagtttgggtacagtctttttgtagaatctgcaaaacatatttgtgagccctttattgcctatggtggaataggaatcttcttcacatataaactagacagaagcattctgaggaaggtcgtcgtgacgtgtgcattcgtctcacatagttgaagctttctttggattgagcagttttgaaacagtccttctgtaggatctgcaaggggatatttctgagcccattgagtactgtgatgcaatgtgaagtatcttcacataaaaactagacagacgctttctaagaaacttcgttgtgatgtgtgctttcgtctcacagaattgaaactatcctttgattgaggagtttggaaacactctttttctagagtctgcaaatggatatttggagagcttttgaggtccgtggtgaaaaacgaaatatcttcacgtaaaaactaaacagaagcttcctgagaaactcccttgcgaagtgtgtgcattcacctcaccgagtggaaactttcttttgattgagcagattggaaagaggcttattgtacaatctgcaaagggagaattctgatccgtttgaggcttctggtgaaagagaaatatcttcccataagaactagacggaagcattccaagaaattgtttgtgatgtgtccattcacgtcacagagttgaacctctcctttgattgatcagtttggaaacagtctttttgtagaacctgcagagggatatttgtgagccctttaaggcctgtggtgaaatacgaagtatcttcacctaaaaactagacagaaggtttctgagaaacttcttggtgatgtgtgccttcatctcacagtgttgaacctttcttttcattgagcagtttgcaaagtctttctgtagaatctgcaaatggatatttggagatatttgaggcccgtggtgaaaaaggaagtatcttcacctaaaaaccagacagaagatttctgaaaaacctctttgtgatgtgtgaattcatgtcacagaattcaacctttctttcagttgagcattttggaaacagtctttggtagaagctgcagagggaaatttcttagctgcttgaggcctatggtgaaaaagaaatatcttcacagaaaaactagacagaagctttctgagaaacttcttcgtgatgtgtccattcatctcacagagttaaacctttcttttgattgaggagtttggaaaacgtcttttcttagaatctgcgaagggatatttgtgagccctttatggcctttgttgcaatatgaaatatcttcacataaaaagtagacagaagctttctgacaaatttcttggtgatgtgcacgtttgtcacacggaattgaacccttcttctgattgagcagtttggattcagtctttttgtagaatctgtgaatgtgtatttagagagttttaaggcctagggtgcaaaaggcaatgtcttcacataaaaacgacacagtagctttttgaggaaactctttgtgacatttccattcatctctaatagttggccatttcctttcattgagcagtttggaagcagtctttttctacaaactgcaaagggatatttctgagcggtttggggccaacggtgaaaaataaatatcttcccatgaaaactagacagaagcattttgagaaacttctttttgatgtgtgtattcatctcacagagttgaacctttctttagatttagcaatttggagaaagtctcttggtagtataagtggagttatatttgcgagcggtttaaggcctatggtgccaaaggaaataccttcacataaaatgcagacagaggctttccgagaaacttctttgtgatgtgtgctttcgtctcacagagttgcgcctttcttttgattgaccagtttgggaacattctttttgtagaatctgcaaatggatatttggagcaatttgtggcctacggtgaaaaaggaaatatcttcacatgaaaactagacaggagaatcctgagaaacttctttttgatgagtgcattcatttcacatagttgaaacatgctatatgggccagtttggaaacagtcttttggtagagtctgcagacagatatttttgaggggcttagagactatggtgaaaaaggaaacatcttcacatagcaaccagacagaagcaacctgagaaatgtctttgggatgtgttcattcatctcacaatgttgaacgtttctcttgattgagaagtttgtaaggagaacatttgtagaatctgcaaaggggtatatgtgagccccttgattcctatggcaaaataggaatcatcttgagataaaagcgagacagaagatttctgagaaacttttttgtgatgtgtgctttcatctcacagagttgaaaatttcttttgattgagcagtttggaaacagtcttttcgtatcatctgcaaacggatgtttggagcgctttgtggcctaaggtgaaaatggaaacatcttcacataaaaactagacagaagaattctgaggaacttctttatgatgtgtgcattcatctcacatgggtgaaattttcttttgatggagcagtttggaaacagtctttttctagtatctgcagaaggatatttgtgagcggtgtaaggcctatggtgaaaaaggaaatatcttcacataaaaaccagacagaagctttctgaggaacttctttgtgatgtgtgcattcatctcaccgtgttgaaactttaagttatttgagcagtttagagacagtctttctctgcaatctgcaaaggtctaactctgagccctttaaggtctatggtgaaaaagaaatgtcttcacatttaaactagacagaagcattctgaggaacttctttgtgatgtctccattcatctgacagagttgaaggtttcttttaattcagcactttggaaagcatatttttgtagaatctgcaaagggatatttttgagacatttgaagcctatagtgaaatagtaaatatcttcacatgaaaactagacaggagaattctgagaaacttcattctaatgtgtgcattcacctcacagaatttaacctttattttgattgagcagtatggaaatggtcctcttttagaatctgcaaagggatatttcttagccctttgaggcctatggtgaaactggaaatatcttcacatgaaaactagaccgaagctttctgagaaatttctttgaaatgtgtgctttcatctcacagagttaaaactttcttttgattgagcagtttagaaacactctttttgtgaaatctgtaaatggatattaggagcactttgaggccaatggtgacaaaggatatatcttcatgtaaaaactaaacagaagttttctgagaaactactttttgatgtgtccattaatctaacagagttgaaactttctttttatttaacagtttggatatagtatttttgtagaatctgccaaaaatatttgtgagccctttattgcctatggtgaaataggaattttcttcacatataaactagacagaagcattctgaggaacgtcttcgtgacgtgtgcattcatctcacatagttgaaactttctttggattgagcagttttgaaacagtccttttgtgggatctgcaaggggatatttctgagcccattgagtactgtgatgcaatgtgaagtatcttcacataaaaactacacagacgctttctaagaaacttcgttgtgatgtgtgctttcatctcacagaattgaaactatcctttgatggaggagtttggaaacactctttttctagaatctgcaaagggatatttggagagcttttcaggcccgtggtgaacaacgaaatatcttcacgtaaaaactaaacagaagctttctgagaaactcccttgcgatgtgtgcattcacctcagcgagtggaaactttcttttgattgagcagattggaaagaggcttatcgtacaatctgcaaagggagaattctgatccgtttgaggcttatggtgaaagagaaatatcttcccatgagaactagacggaagctttctgagaaacttcttcatgatgtgtccattcatctcacagagttaaacctttcttttgattgaggagtttggcaaacgtcttttcttagaatctgcgaagggatatttgtgagccctttatggcctttgttgaaatatgaaatatcttcacataaaaagtagacagaagatttctgagaaaattctttctgatgtgtgctttcatctcacagtgttgaacctttcttttgattgagcagtttggaaagtctgtttgtcgaatctgcaaatggatatttggaactatttgaggcccatggtgaaaaagaaagtatcttcacataaaaactagacagaagatttctgagaaacttctttgtgttgtgtaaattcatgtcacagaattcaacctttctttcgattgagcagtttggaaacagtattttgtagaagctgcaaagggaaatttcttagccgtttgagtcctatagtgaaaaagaaatatcttcacataaaaactagacagaagctttctgagaaacttcttcgtgatgtgtccattcatctcacagtgttaaacctttcttttgagtgaggagtttggaaaacgtcttttcttagaatctgcgaagggatatttgtgagccctttaaggcctttgttgaaatatgaaatatcttcacataaaaagtagacagaagctttctgacaaatttctttgtgatgtgcaagtttgtcacacggaattgaacccttattctgattgagcagtttggaatcagtctttttgtagaatctgtgaatgtgtatttagggagttttaaggcctagggtgcaaaaggcaatgtcttcacataaaaacgacacagtagcttttcgagaaaactctttgcgacatttccattcatctctaatagttgaccatttcctttcattcagcagcttggaagcagtctttttctacaaactgcaaagggatatttctgagcggtttggggccaatggtgaaaaataaatatcttcccatgaaaactagacagaagcattttgagaaacttcttttgatgtgtgtattcatctcacagagttgaacctttcttttgatttagcaatttggagaaagtctcttggtagtataagtggagttatatttgcgagcggtttaaggcctatggtgccaaaggaaataccttcacataaaatgtagacagaggctttccgagaaacttctttgtgatgtgtgctttcgtctcacagagttgcgcctttcttttgattgaccagtttgggaacattctttttgtagaatctgcaaatggatatttggagcaatttgtggcctatggtgaaaaaggaaatatcttcacataaaaactagacaggagaatcctgagaaacttctttttgatgagtgcattcatttcacatagttgaaacatgctatgtgggccagtttggaaacagtcttttggtagagtctgcagacagatatttttgagtggcttaaagactatggtgaaaaaggaaacatcttcacatagcaaccagacagaagcaacctgagaaacgtgtttgggatgtgttcattcatctcacaatgttgaacgtttcttttgattgagaagtttgtaaggagaacttttgtagcatctgcaaaggggtatatgtgagccccttgattcttatggcaaaataggaattatcttgagataaaagcgagacagaagatttctgagaaacttttttgtgatgtgtgctttcatctcacagagttgaaaatttcttttgattgagcagtttggaaacagtcttttcgtatcatctgcaaatggatgtttggggcgctttgtggcctaaggtgaaaatggaaacaccttcacataaaaactagacagaagaattctgaggaacttctttatgatgtgtgcattcatctcagataggtgaaattttcttttgatggagcagtttggaaaccgtctttttatagtatctgcagaaggatacttgtgagcggtgtaaggcctatggtgaaaaaggaaatatcttcacataaaaaccagacagaagctttctgagaaacttctttgtgatgtgtgcattcatctcacagtgttgaaactttattttatttgagcagtttagagacagtctatttctgcaatctgcaaaggcatatttctgagccatttgaggtctgtggtgaaagagaaatatcttcacatttaaactagacagaagcattccgaggaacttctttgtgatgtctctattcatctgacagatttgaaggtttcttttaattcagcactgtggaaaccatatttttgtagaatctgcaaagggatatttttgagacctttgaagcctatagtgaaatagtaaatatcttcacatagaaactagacaggagaattctgagaaacttcattctgatgtgtgcattaacctcacagaatttaacgtttcttttgattgagaagtatggaaatggtggtcttttagaacctggaaagggatatttcttagccctttgaggcctatggtgagactggaaatatcatcacatgaaaactagtccgaagctttctgagaaacttcttggagatgtgtgctttcacctcacagagttaaacactttcttttgattgagctgtttggaaacactctttttgtgaaatctgtaaatggatattaggagtgctttgaggccaatggtgacaaaggaaatatcttcacataaaaactaaacagaagttttctgagaaactactttttgatatgtccattaacctaacagagttaaaaccttctttttattgagcagtttggatacagtccttttgtacaatctgcaaaacatatttgtgagccctttattgcctatggtgaaataggaatcttcttcacatataaactagacagaagcattctgaggaacttcttcgtgacgtgtgcattcgtctcacatagttgaagctttctttggattgagcagttctgaaacagtccttttgtaggatctgcaaggggatatttctgagcccattgagtactgtgatgcaatgtgaagtatcttcacataaaaactagacagacgctttctaagaaacttcgttgtgatgtgtgctttcatctcacagaattgaaactatcctttgattgaggagtttggaaacactctttttctagaatctgcaaatggatatttggagagcttttgaggcccgtggtgaaaaacgaaatatcttcacgtaaaaactaaacagaagcttcctgagaaactcccttgcgatgtgtgcattcacctcaccgagtggaaactttcttttgattgagcagattggaaagaggcttattgtacaatctgcaaagggagaattctgatccgtttgaggcttctggtgaaagagaaatatcttcccataagaactagacggaagcattccaagaaattgtttgtgatgtgtccattcacgtcacagagttgaacctctcctttgattgatcagtttggaaacagtctttttgtagaacctgcagagggatatttgtgagccctttaaggcctgtggtgaaatacaaagtatcttcacctaaaaactagacagaaggtttctgagaaacttcttggtgatgtgtgccttcatcttaccgtgttgaacctttcttttgattgagcagtttggaaagtctttctgtagaatctgcaaatggatatttggagatatttgaggcccgtggtgaaaaaggaagtatcgtcacctaaaaaccagacagaagatttctgaaaaacctctttgtgatgtgtgaattcatgtcacagaattcaacctttctttcagttgagcagtttggaaacagtctttggtagaagctgcagagggcaatttcttagctgcttgaggcctatggtgaaaaagaaatatcttcacagaaaaactagacagaagctttctaagaaacttctttgtgatgtgtccattcatctcacagagttaaacctttcttttgattgaggagtttggaaaatgtcttttcttagaatctacaaagggatatttgtgagccctttatggcctatgttgaaatatgaaatatcttcacataaaaactagacagaagctttctgacaaattccttggtgatgtgcacgtttgccacacggaattgaacccttcttctgattgagcagtttggaatcagtccttttgtagaatctgtgaatgtgtactgagagagttttaaggcctagggtgccaaaggcaatgtcttcacataaaaacgacacagtagctttttgagaaaactctttgtgacatttccattcatctctaatagttggccatttccttacattgagcagtttggaagcagtctttttctacaaactgcaaagggatatttctgagcggtttggggccaacggtgaaaaataaatatcttcccatgaaaactagacggaagcattttgagaaacttctttttgatgtgtgtattcatctcacagggttgaaactttcttttgatttagcaatttggagaaagtctcttggtagtataagtggagtcatatttgcgagcggtttaaggcctatggtgccaaaggaaataccttcacataaaatgtagacagaggctttccgagaaacttctttgtgatgtgtgctttcgtctcacagagttgcgcctttctgttgattgaccagtttgggaacattctttttgtagaatctgcaaatggatatttggagcaatttgtggcctacggtgaaaaaggaaatatcttcacataaaaactagacaggagactcctgaaaaactactttttgatgagtgcattcgtttcacatagttgaaacatgccatatgggccagtttggaaagagtctttttgtagagtctgcagacagatatttttgagtggcttaaaggctatggtgaaaaaggaaacatcttcacatagcaaccagacagaagcaacttgagaaatgtctttgggatgtgttcattcatctcacaatgttgaacgtttctcttgattgagaagtttgtaaggagaacatttgtagaatctgcaaaggggtatatgtgagccccttgattcctatggcaaaataggaatcatcttgagataaaagcgagacagaagatttctgagaaactttttagtgatgtgtgctttcatctcacagagttgaaaatttctcttgattgagcagtttggaaacagtctcttcgtatcatctgcaaacggatgtttggggcgctttgtggcctaaggtgaaaatggaaacatcttcacataaaaactagacagaagaattctgaggaacttctgtatgatgtgtgcattcatctcagataggtgaaattttcttttgatggagcagtttggaaacagtctttttatagtatctgcagaaggatatttgtgagcggtgtaaggcctatggtgaaaaaggaaatatcttcacataaaaaccagacagaagctttctgaggaacttctttgtgatgtgtgcattcatctcaccgtgttgaaactttatgttatttgagcagtttagagacagtctttctctgcaatctgccaaggtccaactctgagccctttgaggtctatggtgaaaaagaaatgtcttcacatttcaactagacagaagcattccgaggaacttctttgtgatgtccccattcatctgacagagttgaaggtttcttttaattcagcactgtggaaaccatatttttgtagaatctgcaaagggatatttttgagacctttgaagcctatagtgaaatagtaaatatcttcacatagaaactagacagggagaattctgagaaacttcattctgatgtgtgcattcacctcacagaatttaacctttcttttgattgagcagtatggaaatgttcgtcttttagaatttggaaagggatatttcttagccctttgaggcctatggtgaaactggaaatatcttcacatgaaaactagaccaaagctttctgagaaagttctttgagatgtgtgctttcatctcacagagttaaaactttcttttgattgagcagtttggaaacactctttttgtgatatctgtaaatggatattaggagtgctttgaggccaatggtgacaaaggaaatatcctcacataaaaactaaacagaagttttcttgagaaactactttttgatgtgtccattaacctaacagagttaaaactttctttttattgagcagtttgggtacagtctttttgtagaatctgcaaaacatatttgtgagccctttattgcctatggtggaataggaatcttcttcacatataaactagacagaagcattctgaggcacttcttcgtgacgtgtgcattcgtctcacatagttgaaactttctttggattgagcagttttgaaacagtccttttgtaggatctgcaaggggatatttctgagccccttgtgtactgtgatgcaatgtgaagtatcttcacataaaaacttcacagaagctttctaagaaacttcgttgtgatgtgtgctttcatctcacagaattgaaactatcctttgattgaggagtttggaaacactctttttctagaatctgcaaatggatatttggagagcttttgaggccagtggtgaaaaacgaaatatcttcacgtaaaaactaaacagaagctttctgagaaactcccttgcgatgtgtgcattcacctcaccgagtggaaactttcttttgattgagcagattggaaagaggcttatcgtacaatctgcaaagggagaattctgatccgtttgaggcttatggtgaaagagaaatatcttcccataagaactagacggaagcattccaagaaattttttgtgatgtgtccatttacgtcacagagttgaacctctcctttgattgggcagtttgggaacagtctttttgtagaacctgcagagggatatttgtgagccctttatggcctgtggtgaaatacgaagtatcttcacctaaaaactagacagaaggtttctgagaaacttcttggtgatgtgtgccttcatctcacagtgttgaacccttcttttgattgagcagtttgcaaagtctttctgtagaatctgcaaatggatatttggagatatttgaggcccgtggtgaaaaaggaagtatcttcacctaaaaaccagacagaagatttctgaaaaacctctttgtgatgtgtgaatttatgtcacagaattcaacctttctttcagttgagcagtttggaaacagtctttggtagaagctgcagagggaaatttcttagctgcttgaggcctatggtgaaaaagaaatatcttcacagaaaaactagacagaagctttctgagaaacttctttgtgatgtgtccattcatcacacagagtgaaacctttcttttgattgaggagtttggaaaatgtctttccttagaatctgcaaagggatatttgtgagccctttatggcctttgttgaaatatgaaatatcttcacataaaaagtagacagaagctttctgacaaattccttggtgatgtgcacgtttgtcacacggaattgaacccttcttctgattgagcagtttggaatcagtctttttgtagaatctgtgaatgtgtattgagagagttttaaggcctagggtgccaaaggcaatgtcttcacataaaaacgacacagtagctttttgagaaaactctttgtgacatttccattcatctctaatagttgaccatttcctttcattgagcagtttggaagcagtctttttctacaaactgcaaagggatatttcggagcggtttggggccaacggtgaaaaataaatatcttcccatgaaaactagacagagaagcattttgagaaacttctttttgatgtgtgtattcatctcacagagttgaacctttcttttgatttagcaatctggagaatgtctctaggtagtataagtggagttatgtttgcgagcggtttaagtcctatggtgccaaaggaaataccttcacataaaatgtagacagaagctttccgggaaacttctttgtgatgtgtgctttcgtctcacagagttgcgcctttcttttgattgaccagtttgggaacattctttttgtagaatctgcaaatggatatttggagcaatttgtggcctacagtgaaaaaggaaatatcttcacataaaaactagacaggagaatcctgaggaactcctttttgatgagtgcattcatttcacatagttgaaacatgctatatgggccagtttggaaacagtctttttgtagagtctgcagacaggtattttagagtggcttaaagactatggtgaaaaaggaaacatcttcacatagcaaccagacagaagcaacctgagaaacgtctttgggatgtgttcattcatctcacaatgttgaacgtttcttttgattgagaagtttttaaggagaacttttgtagaatctgcaaagggatatatgtgagccccttgattcctatggcaaaataggaattatcttgagataaaagcgagacagaagatttctgagcaaacttctttgtgatgtgtgctttcatctcacagagttgaaaatttcttttgattgagcagtttggaaacagtctttttgtataatctgcaaatggatatttggagcactttgtggcctaaggtgaaaatggaaatatcttcacataaaaactagacagaagaattctgaggaacttctgtatgatgtgtgcattcatctcagtataggtgaaattttcttttgatggagcagtttggaaacagtctttttatagtatctgcagaaggatattcgtgagcggtgtaaggcctatggtgaaaaaggaaatatcttcacattaaaaccagacagaagctttctgaggaacttctttgtgatgtgtgcattcatctcaccgtgttgaaactttatgttatttgagcagtttagagacagtctttctctgcaatctgcaaaggtctaactctgagccctttgaggtctatggtgaaaaagaaatgtcttcacatttaaactagacagaagcattctgaggaacttctttgtgatgtctccattcatctgagagagttgaaggtttcttttaattcagcactttggaaagcatatttttgtagaatctgcaaagggatatttttgagacatttgaagcctatagtgaaatagtaaatatcttcacatgaaaactagacaggagaattctgagaaacttcattctgatatgtgcattaacctcacagaatgtaacctttcttttgattgagaagtatggaaatggtggtcttttagaatctggaaagagatatttcttagccctttgaggcctatggtgagactggaaatatcatcacatgaaaactagaccgaagctttcggagaaacttctttgagatgtgtgctttcacctcacagagttaaacactttcttttaattgagcagtttggaaacactctttctgtgacatctgtaaatggatattaggagtgctttgaggccaatggtgacaaaggaagtatcttcacataaaaactacacagaagttttctgagaaactactttttgatgtgtccattaacctaacagagttaaaactttctttttattgagcagtttggatacagtccttttgtagaatctgcaaaacatatttgtgagccctttattgcctatggtgaaataggaatcttcttcacatataaactagacagaagcattctgaggaaggtcttcgtgacgtgtgcattcgtgtcacatagttgaagctttctttggattgagcagttttgaaacagtccttttctaggatctgcaaggggatatttctgagcccattgagtactgtgatgcaatgtgaagtatcttcacataaaaactagacagacgctttctaagaaacttcgttgtgatgtgtgctttcatctcacagaattgaaactatgctttgattgaggagtttggaaacactctttttctagaatctgcaaatggatatttggagagcttttgaggccagtggtgaaaaacgaaatatcttcacgtaaaaactaaacagaagctttctgagaaactcccttgcgatgtgtgcattcacctcacccagtggaaactttcttttgattgagcagattggaaagaggcttatcgtacaatctgcaaagggagaattctgatccgtttgaggcttatggtgaaagagaaatatcttcccataaaaactagacggaagcattccaagtaattttttatgatgtgtccattcacgtcacagagttgaacctctcctttgattgagcagtttggaaacagtctttttgtagaacctgcaaagggatatttgtgagccctttatggcctgtggtgaaatacgaagtatcttcacctaaaaactagacagaaggtttctgagaaacttcttggtgatgggtgccttcatctcacagtgttaaacctttcttttgattgagcagtttgcaacgtctttctgtagaatctgcaaatggatatttggagatatttgaggcccgtggtgaaaaaggaagtatcttcacctaaaaaacagacagaagatttctgaaaaacctctttgtgatgtgtgaattcatgtcacagaattcaacctttctttcaggtgagcagtttggaaacagtctttggtagaagctgcagagggaaattttttagctgcttgaggcctattgtggaaaagaaatatcttcacagaaaaactagacagaagctttctgagaaacttcttcgtgatgtgtccattcatctcacagagttaaacctttcttttggttgaggagtttggaaaacgtcttttcttagaatctgcgaagggatatttgtgagtcctttatggcctttgttgaaatatgaaatatcttcacataaaaagtagacagaagctttctgacaaattccttggtgatgtgcacgtttgccacacggaattgaacccttcttctgattgagcagtttggaatcagtctttttgtagaatctgtgaatgtgtatttagagagttttaaggcctagggtgccaaaggcaatgtcttcacataaaaacgacacagtagctttttgagaaaactctctgcgacatttccattcatctctgatagttgaccatttcctttcattgagcagtttggaagcagtctttttctacaaactgcaaagggatatttctgagcggtttggggccaacggtgaaaaataaatatcttcccatgaaaactagacagaagcattttgagaaacttctttttgatgtgtgtattcatctcacagagttgaacctttcttttgatttagcaatctggagaaagtctctaggtagtataagtggagttatatttgcgagcggtttaaggcctatggtgccaaaggaaataccttcacataaaatgtagacagaggctttccgagaaactttctttgtgatgtgtgctttcgtctcacagagttgcgcctttcttttgattgaccagtttgggaacattctttttgtagaatctgcaaatggatatttggagcaatttgtggcctacggtgaaaaaggaaatatcttcacataaaaactagacaggagaatcctgagaaacttctttttgatgagtgcattcatttcacatagttgaaacatgctatatgggccagtttggaatcagtcttactgtagagtccgcagacaggtatttttgagtggcttaaagaccatggtgaaaaaggaaacatcttcacatagcaaccagacagaagcaacctgagaaacgtctttgggatgtgttcattcatctcacaatgttgaacgtttctcttgattgagaagtttgtaaggagaacatttgtagaatctgcaaaggggtatatgtgagccccttgattcctatggcaaaataggaatcatcttgagataaaagcgagacagaagatttctgagaaacttttttgtgatgtgtgctttcatctcacagagttgaaaatttctcttgattgagcagtttggaaacagtctcttcgtatcatctgcaaacggatgtttggggcgctttgtggcctaaggtgaaaatggaaacatcttcacataaaaactagacagaagaattctgaggaacttctttatgatgtgtgcattcatctcagatgggtgaaattttcttttgatggagcagtttggaaacagtctttttctagtatctgcagaaggatatttgtgagcggtgtaaggcctatggtgaaaaaggaaatatcttcacataaaaaccagacagaagctttctgaggaacttctttgtgaggtgtgcatttatctcaccgtgttgaaactttattttatttgagcagtttagagacagtctttctctgcaatctgcaaaggtctaattctgagccctttgaggtctatggtgaaaaagaaatgtcttcacatttaaactagacagaagcattctgaggaacttcgttgtgatgcctccattcatctgacagagttgaaggtttcttttaattcagcactttggaaagcatatttttgtagaatctgcaaagggatatttttgagacatttgaagcctatagtgaaatagtaaatatcttcacatgaaaactagacaggagaattctgagaaacttcattctgatgtgtgcattaacctcacagaatgtaacctttcttttgattgagaagtatggaaatggtggtcttttagaatctggaaagggatatttcttacccctttgaggcctatggtgagactggaaatatcatcacatgaaaactagaccgaagctttcggagaaactcctttgagatgtgtgctttcacctcacagagttaaacactttcttttgatggagcagtttggaaacactctttctgtgacatctgtaaatggatattaggagtgctttgaggccaatggtgacaaaggaagtatcttcacagaaaaactacacagaagttttctgagaaactactttttgatgtgtccattaacctaacagagttaaaactttctttttattgagcagtttggatacagtctttttgtagaatctgcaaaacatatttgtgagccctttattgcctatggtggaataggaatcttcttcacatataaactagacagaagcattctgaggaacttcttcgtgacgtgtgcattcgtctcacatagttgaaactttctttggattgagcagttttgaaacagtccttttgtaggatctgcaaggggatatttctgagcccattgagtactgtgatgcaatgtgaagtatcttcacataaaaactggacagaagctttctaagaaacttcgttgtgatgtgtgctttcatctcacagaattgaaactatcctttgattgaggagtttggaaacactctttttctaggatctgcaaatggatatttggagagctttagaggcccgtggtgaaaaacgaaatatcttcacgtaaaaactaaacagaagctttctgagaaactcccttgcgttgtgtgcattcacctcaccgagaggaaactttcttttgattgagcagattggaaagaggcttatcgtacaatctgcaaagggagaattctgatccgtttgaggcttatggtgaaagagaaatatcttcccataaaaactagacggaagcattccaagaaattgtttgtgatgtgtccattcacgtcacagagttgaacctctcctttgattgagcagtttggaaacagtctttttgtagaacctgcaaagggatatttgtgagccctttatggcctgtggtgaaatacgaagtatcttcacctaaaaactagacagaaggtttctgagaaacttcttggtgatgtgtgccttcatctcacagtgttgaacctttcttttgattgagcagtttggaaagtctttctgtagaatctgcaaatggatatttggagatatttgaggcccgtggtgaaaaaggaagtatcgtcacctaaaaaccagacagaagatttctgaaaaacctctttgtgatgtgtgaattcatgtcacagaattcaacctttctttcagttgagcagtttggaaacagtctttggtagaagctgcagagggaaatttcttagctgcttgaggcctatggtgaaaaagaagtatcttcacagaaaaactagacagaagctttctgagaaacttcttcgtgatgtgtccattcatctcacagtgttaaacctttcttttgagtgaggagtttggaaaacgtcttttcttagaatctgcgaagggatatttgtgagccctttatggcctttgttgaaatatgaaatatcttcacataaaaagtagacagaagctttctgacaaatttcttggtgatgtgcacgtttgtcacacggaattgaacccttcttctgattgagcagtttggaatcagtctttttgtagaatctgtgaatgtgcatttagagagttttaaggcctagtgtgcaaaaggcaatgtcttcacataaaaacgacacagtggctttttgagaaaactctttgtgacatttccattcatctctaatagttggccatttccttacattgagcagtttggaagcagtctttttctacaaactgcaaagggatatttctgagcggtttggggccaacggtgaaaaataaatatcttcccatgaaaactagacagaagcattttgagaaacttctttttgatgtgtgtattcatcttacagagttgaacctttcttttgatttagcaatttggagaaagtctcttggtagtataagtggagttatatttgcgagcggtttaaggcctatggtgccaaaggaaataccttcacataaaatgcagacagaagctttctgagaaacttctttgtgatgtgtgctttcgtctcacagagttgagcctttctgttgattgaccagtttggaaacattctttctgtagaatccgcaaatggatatttggagcaatttgcggcctgcggtgaagaaggaaatatcttcacataaaaactagacagaagaatcctgagaaacttctttttgatgagtgcattcatttcacatagttgaaacatgctatatgggccagtttggaaacagtcttttggtagagtctgcagacagatatttttgaggggcttaaggactatggtgaaaaaggaaacatcttcacatagcaaccagacagaagcaacctgagaaacgtctttgggatgtgttcattcacttcacaatgatgaacgtttcttttgattgagaagtttgtaaggataacttttgtagaatctgcaaagggatatatgtgagccccttgattcctatggcaaaataggaattatcttgagataaaagccagacagaagatttctgagaaacttttttgtgatgtgtactttcatctcacagagttgaaaaattcttttgattgagcagtttggaaacagtcttttcgtatcatctgcaaatggatgtttggggcgctttgtggcctaaggtgaaaatggaaacaccttcacataaaaactagacagaagaattctgaggaacctctttatgatgtgtgcattcatctcagatgggtgaaattttcttttgatggagcagtttggaaacagtctttttctagtatctgcagaaggatatttgtgagcggtgtaaggcctatggtgaaaaaggaaatatcttcacataaaaaacagacagaagctttctgaggaactttttgtgaggtgtgcattcatctcaccgtgttgaaactttattttatttgagcagtttagagacagtctttctctgcaatctgcaaaggtctaattctgagccctttgaggtctatggtgaaaaagaaatatcttcccatttaaactagacagaagcattctgaggaacttcgttgtgatgcctctccattcatcggacagagttgaaggtttcttttaattcagcactttggaaagcatatttttgtagaatctgcaaagggatatttttgagacatttgaagcctagagtgaaatagtaaatatcttcccatgaaaactagacaggagaattctgagaaacttcattctgatgtgtgcattaacctcacagaatttaacctttcttttgattgagaagtatggaaatggtggtcttttagaacctggaaagggatatttcttagccctttgaggcctatggtgagactggaaatatcatcacatgaaaactagtccgaagctttcggagaaacttctttgagatgtgtgctttcacctcacagagttaatcactttcttttgattgagcagtttggaaacactctttctgtgacatctgtaaatggatattaggagtgctttgaggccaatggtgacaaaggaaatatcttcacataaaaactacacagaagttttctgagaaactactttttgatgtgtccattaacctaaaagagttaaaactttctttttattgagcagtttggatacagtccttttgtagaatctgcaaaacatatttgtgagccctttattgcctatggtgaaataggaatcttcttcacatataaactagacagaagcattctgaggaacgtcttcgtgacgtgtgcattcatctcacatagttgaaactttctttggattgagcagttttgaaacagtccttttgtaggatctgcaaggggatatttctgagcccattgagtactgtgatgcaatgtgaagtatcttcacataaaaactacacagacgctttctaagaaacttcgttgtgatgtgtgctttcatctcacagaattgaaactatcgtttgattgaggagtttggaaacactctttttctagaatctgcaaatggatatttggagagcttttgaggcccgtggtgaaaaacgaaatatcttcacgtaaaaactaaacagaagctttctgagaaactcccttgcgatgtgtgcattcacctcaccgagtggaaactttcttttgattgagcagattggaaagaggcttatcgtacaacctgcaaagggagaattctgatccgtttgaggcttatggtgaaagagaaatatcttcccataaaaactagacggaagcattccaagaaattttttgtgatgtgtccattcacgtcacagagttgaacctctcctttgattgagcagtttggaaacagtctttttgtagaacctgcaaagggatatttgtgagccctttatggcctgtggtgaaatacgaagtatcttcacctaaaaactagacagaaggtttctgagaaccttcttggtgatgtgtgccttcatctcacagtgttgaacctttcttttgattgagcagtttgcaaagtctttctgtagaatctgcaaatggatatttggaaatatttgaggcccgtggtgaaaaaggaagtatcttcacctaaaaaccagacagaagatttctgaaaaacctctttgtgatgtgtgaattcatgtcacagaattcaacctttctttcaggtgagcagtttggaaacagtctttggtagaagctgcagagggaaatttcttagctgcttgaggcctatggtgaaaaagaaatatcttcacagaaaaactagacagaagctttctgagaaacttcttcgtgatgtgtccattcatctcacagagttaaacctttcttttgattgaggagtttggaaaatgtcttttcttagaatctgcgaagggatatttgtgagccctttatggcctttgttgaaatatgaaatatcttcacataaaaagtagacagaagctttctgacaaattccttggtgatgtgcacgtttgtcacacggaattgaacccttcttctgattgagcagtttggaatcagtctctttgtagaatctgtgaatgtgtatatagagagttttaaggcctagggtgccaaaggcaatgtcttcacataaaaacgacacagtagctttttgagaaaactctttgtgacatttccattcatctctaatagttgaccatttcctttcattgagcagtttggaagcagtctttttctacaaactgcaaagggatatttcggagcggtttggggacaacggtgaaaaataaatatcttcccatgaaaactagacagaagcattttgagaaacttctttttgatgtgtgtattcatctcacagagttgaacctttcttttgatttagcaatttggagaaagtctcttggtagtataagtggagtcatatttgtgagcggtttaaggcctatggtgccaaaggaaatacctttacataaaatgtagacagaagctttccgagaaactcctttgtgatgtgtgctttcgtctcacagggttgcgcctttcttttgattgaccagtttgggaacattctttttgtagaatctgcaaatggatatttggagcaatttgtggcctacggtgaaaaaggaaatatcttcacataaaaactagaccggagaatcctgagaaacttctttttgatgagtgcattcatttcacatagttgaaacatgctatgtgggccagtttggaaacagtcttttggtagagtctgcagacagatatttttgagtggcttaaagactatggtgaaaaaggaaacatcttcacatagcaacctgacagaagcaacttgagaaacgtctttgggatgtgttcattcatctcacaatgttgaacgtttctcttgattgagaagtttgtaaggagaacatttgtagaatctgcaaaggggtatatgtgagccccttgattcctatggcaaaataggaatcatcttgagataaaagcgagacagaagatttctgagaaacttttcgtgatgtgtgctttcatctcacagagttgaaaatttcttttgattgagcagtttggaaacagtcttttcgtatcatctgcaaacggatgtttggagcgctttgtggcctaaggtgaaaatggaaacatcttcacataaaaactagacagaagaattctgaggaacttctgtatgatgtgtgcattcatctcagataggtgaaattttcttttgatggagcagtttggaaacagtctttttatagtatctgcagaaggatattcgtgagcggtgtaaggcctatggtgaaaaaggaaatatcttcacattaaaaccagacagaagctttctgaggaacttctttgtgatgtgtgcattcatctcaccgtgttgaaactttattttatttgagcagtttagagacagtctttctctgcaatctgcaaaggtctaattctgagccctttgaggtctatggtgaaaaagaaatatcttcacatttaaactagacagaagcattctgaggaacttcgttgtgatgcctccattcatctgacagagttgaaggtttcttctaattcagcactttggaaagcatatttttgtagaatctgcaaagggatattttttagacttttgaagcctatagtgaaatagtaaatatcttcccatgaaaactagacaggagaattctgagaaacttcattctgacgtgggcattaacctcagagaatttaacctttcttttgattgagaagtatggaaacggtcgtcttttagaatctggaaagggatatttcttagccctttgaggcctacggtgaaactggaaatatcttcacatgaaaagtagaccgaagctttcggacaaacttctttgagatgtgtgctttcacctcacagagttaaacactttcttttgattgagcagtttggaaacactctttctgtgacatctgtaaatggatattaggagtgctttgaggccaatggtgacaaaggaagtatcttcacataaaaactacacagaagttttctgagaaactacttgttgatgtgtccattgatgtaacagagttaaaactttctttttattgagcagtttggatacagtctttttgtagaatctgcaaaaatatttgtgagccctttattgcctatggtgaaataggaatcttcttcacatgtaaacaagacagaagcattctgaggaaggtcttcatgacgtgtgcattcgtgtcacatagttgaagctttctttggattgagcagttttgaaacagtccttttgtaggatctgcaaggggatatttctgagcccattgagtactgtgatgcaatgtgaagtatcttcacataaaaactagacagatgctttctaagaaacttcgttgtgatgtgtgctttcatcgcacagaattgaagctatcctttgattgaggcgattggaaacactctttttctagaatctgcaaatggatatttggagagcttttgaggcccgtggtgaaaaacgaaatatcttcacgtaaaaactaaacagaagctttctgagaaactcccttgcgatgtgtgcattcacctcaccgagtggaaactttcttttgattgagcagattggaaagaggcttatcgtacaatctgcagagggagaattctgatccgtttgaggcttatggtgaaagagaaatatcttcccataagaactagacggaagcattctaagaaattttttgtgatgtgtccattcacgtcacagagttgaacctctcctttgattgggcagtttggaaacagtctttttgtagaacctgcaaagggatatttgtgagccctttatggcctgtggtgaaatacgaagtatcttcacctaaaaactagacagaaggtttctgagaaacttcttggtgatgtgtgccttcatctcacagtgttgaacctttcttttgattgagcagtttggaaagtctttctgtagaatctgcaaatggatatttggagatatttgaggcccgtgctgaaaaaggaagtatcgtcacctaaaaaccagacagaagatttctggaaaacctctttgtgatgtgtgaattcatgtcacagaattcaacctttctttcagttgagcagtttggaaacagtctttggtagaagctgcagagggaaatttcttagctgcttgaggcctatggtgaaaaagaaatatcttcacagaaaaactagacagaagctttctgagaaacttcttcatgatgtgtccattcatcacacagagttaaacctttcttttgattgaggagtttggaaaacgtcttttcttagaatctgcgaaaggatatttgtgagccctttatggcctttgttgaaatatgaaatatcttcacataaaaagtagacagaagctttctgacaaattccttggtgatgtgcacgtttgtcacacggaattgaacccttcttctgattgagcagtttggaatcagtctttttgtagaatctgtgaatgtgtatttagagagttttaaggcctagggtgccaaaggcaatgtcttcacataaaaacgacacagtagctttttgagaaaactctttgtgacatttccattcatctctaatagttggccatttcctttcattgagcagtttggaagcagtctttttctacaaactgcaaagggatatttctgagcggtttggggccaacggtgaaaaataaacatcttcccatgaaaactagacagaagcattttgagaaacttctttttgatgtgtgtattcatctcacagagttgaacctttcttttgatttagcaatttggagaaagtctcttggtagtataagtggagtcatatttgcgagcggtttaaggcctatggtgccaaaggaaataccttcacataaaatgcagacagaagctttccgagaaacttctttgtgatgtgtgctttcgtctcacagagttgcgcctttcttttcattgaccagtttgggaacattcttttcgtacaatctgcaaatggatatttggagcaatttgtggccttcggtgaaaaaggaaatatcttcacatgaaaactagacagggagactcctgagaaacttctttttgatgagtgcattcatttcacatagttgaaacatgccatatgggccagtttggaaacagtctttttgtagagtctgcagacagatatttttgagtggcttaaagactatggtgaaaaaggaaacatcttcacatagcaaccagacagaagcaacctgagaaacgtctttgggatgtgttcattcatctcacaatgttgaacgtttcttttgattgagaagtttgtaaggagaacatttgtagaatctgcaaaggggtatatgtgagccccttgtttcctatggcaaaataggaattatcttgagataaaagcgagacagaagatttctgagaaacttttttgtgatgtgtgctttcatctcacagagttgaaaatttctcttgattgagcagtttggaaacagtcttttcgtatcatctgcaaacggatgtttggggcgctttgtggcctaaggtgaaaatggaaacatcttcacataaaaactagacagaagaattctgaggaacttctttatgatgtgtgcattcatctcagataggtgaaattttcttttgatggagcagtttggaaaccgtctttttatagtatctgcagaaggatatttgtgagcggtgtaaggcctatggtgaaaaaggaaatatcttcacataaaaaccagacagaagctttctgaggaacttctttgtgatgtgtgcattcatctcaccgtgttgaaactttattttatttgagcagtttagagacagtctttctctgcaatctgcaaaggtctaattctgagccctttgaggtctatggtgaaaaagaaatgtcttcacatttcaactagacagaagcattctgaggatcttcgttgtgatgcctctccattcatctgacagagttgaagggttcttttaattcagcactttggaaagcatatttttgtagaatctgcaaagggatatttttgagacatttgaagcctatagtgaaatagtaaatatcttcacatggaaactagacaggagaattctgagaaacttccttctgatgtgtgcattaacctcacagaatttaacctttcttttgattgagaagtatggaaatggtggtcttttagaacctggaaagggatatttcttagccctttgaggcctatggtgagactggaaataccatcacatgaaaactagtccgaagctttcggagaaacttctttgagatgtgtgctttcacctcacagagtaaaacactatcttttgattgagcagtttggaaacactctttctgtgacatctgtaaatggatattaggagtgctttgaggccaatggtgacaaaggaagtatcttcacataaaaactacacagaagttttctgagaaactacttgttgatgtgtccattgatgtaacagagttaaaactttctttttattgagcagtttggatacagtctttttgtagaatctgcaaaaaatatttgtgagccctttattgcctatggtgaaataggaatcttcttcacatgtaaacaagacagaagcattctgaggaacttcttcgtgacgtgtgcattcatctcacatagttgaaactttctttggattgagcagttttgaaacagtccttttgtaggatctgcaaggggatatttctgagcccattgagtactgtgatgcaatgtgaagtatcttcacataaaaactagacagacgctttctaagaaacttcgttgtgatgtgtgctttcatctcacagaattgaaactatcctttgattgaggagtttggaaacactctttttctagaatctgcaaatggatatttggagagcttttgaggcccgtggtgaaaagcgaaatatcttcacgtaaaaactaaacagaagctttctgagaaactcccttgtgatgtgtgcattcacctaaccgagtggaaactttctcttgattgagcagattggaaagaggcttattgtacaatctgcaaagggagaattctgatccgtttgaggcttatggtgaaagagaaatatcttcccataagaactagacggaagcattccaagaaattgtttgtgatgtgtccattcacgtcacagagttgaacctctcctttgattgatcagtttggaaacagtctttttgtagaacctgcagagggatatttgtgagccctttatggcctgtggtgaaatacgaagtatcttcacctaaaaactagacagaaggtttctgagaaacttcttggtgatgtgtgccttcatctcacagtgttgaacctttcttttgattgagcagtttggaaagtctctctgtagaatctgcaaatggatatttggagatatttgaggcccgtgctgaaaaaggaagtatcgtcacctaaaaaccagacagaagatttctgaaaaacctctttgtgatgtgtgaattcatgtcacagaattcaacctttctttcaggtgagcagtttggaaacagtctttggtagaagctgcagagggaaatttcttagctgcttgaggcctatggtgaaaaagaaatatcttcaaagaaaaactagacagaagctttctgagaaacttcttcgtgatgtgtccattcatctcacagagttaaacctttcttttgattgaggagtttgcaaaacgtcttttcttagaatctgcgaagggatatttgtgagccctttttggcctttgttgaaatatgaaatatcttcacataaaaagtagacagaagctttctgacaaatttcttggtgatgtgcacgtttgtcacacggaattgaacccttcttctgattgagcagtttggaatcagtctttttgtagaatctgtgaatgtgcatttagagagttttaaggcctagggtgccaaaggcaatgtcttcacatgaaaacgacacagtagctttttgagaaaactgtttgtgacatttccattcatctctaatagttgaccatttcctttcattgagcagtttggaagcagtctttttctacaaactgcaaagggatatttctgagcggtttggggccaacggtgaaaaataaatatcttcccatgaaaactagacagaagcattttgaggaacttctttttgatgtgtgtattcatctcacagagttgaacctttcttttgatttagcaatctggagaaagtctctaggtagtataagtggagttatatttgcgagcggtttaaggcctatggtgccaaaggaaataccttcacataaaatgtagacagaagctttccgggaaacttctttgtgatgtgtgctttcatctcacagagttgcgcctttcttttgattgaccagtttgggaacattctttttgtagaatctgcaaatggatatttggagcaatttgtggcctacggtgaaaaaggaaatatcttcacataaaaactagacaggagaatcctgagaaccttctttttgatgagtgcattcatttcacatcgttgaaacatgctatatgggccagtttggaaacagtctttttgtggagtctgcagacagatatttttgagtggctaaaagactatggtgaaaaaggaaacatcttcacatagcaaccagacagaagcaaccctgagaaacttctttgggatgtgttcattcatctcccaatgttgaacgtttcttttgattgagaagtttgtaaagagaacttttgtagaatccgcaaagggatatatgtgagccccttgattcctatggcaaaataggaattatcttgagataaaagcgagacagaaggtttctgagaaacttttttgtgatgtgtgctttcatctcacagagttgaaaatttcttttgattgagcagtttggaaacagtcttttcgtatcatctgcaaatggatgtttggggcgctttgtggcctaaggtgaaaatggaaacaccttcacataaaaactagacagaagaattctgaggaacttctttatgatgtgtgcattcatctcagataggtgaaattttcttttgatggagcagtttggaaaccgtctttttatagtatctgcagaaggatattcgtgagcggtgtaaggcctatggtgaaaaaggaaatatcttcacataaaaaccagacagaagccttctgaggaacttctttgtgatgtgtgcgttcatctcaccgtgttgaaactttattttatttgagcagtttagagacagtctttctctgcaatctgcaaaggtctaactctgagccctttgaggtctatggtgaaaaagaaatgtcttcacatttaaactagacagaagcattctgaggaacttcttcgtgatgtctccattcacctgacagagttgaaggtttcttttaattcagcactttggaaagcatatttttgtagaatctgcaaagggatatttttgagatatttgaagcctatagtgaaatagtaaatatcttcacatgaaaactagacaggagaattctgagaaacttcattctgacgtggacattaacctcagagtatttaacctttcttttgattgagaagtatggaaacggtcgtcttttagaatctggaaagggatatttcttagccctttgaggcctacggtgaaactggaaatatcttcacatgaaaagtagaccgaagctttcggagaaacttctttgagatgtgtgctttcacctcacagagttaaacactttcttttgattgagcagtttggaaacactctttctgtgacatctgtaaatggatattaggagtgctttgaggccaatggtgacaaaggaagtatcttcacataaaaagtacacagaagttttctgagaaactacttgttgatgtgtccattaatgtaacagagttaaaactttctttttattgagcagtttggatacagtatttttggagaatctcacaaaaaatatttgtgagccctttattgcctatggtgaaataggaatcttcttcacatgtaaacaagacagaagcattctgaggaacgtcttcgtgacgtgtgcattcatctcacatagttgaaactttctttggattgagcagttttgaatcagtccttttgtaggatctgcaaggggatatttctgagcccattgagtactgtgatgcaatgtgaagtatcttcacataaaaactacacagaagctttctaagaaacttcgttgtgatgtgtgctttcatctcacagaattgaaactatcctttgattgaggagtttggaaacactctttttctagaatctgcaaatggatatttggagagctttagaggcccgtggtgaaaaacgaaatatcttcacgtaaaaactaaacagaagctttgtgagaaactcccttgcgatgtgtgcattcacctcaccgagtggaaactttcttttgattgagcagattggaaagaggcttatcgtacaatctgcaaagggagaattctgatccgtttgaggcttatggtgaaagagaaatatcttcccataagaactagacggaagcattccaagaaattgtttgtgatgtgtccattcacgtcacagagttgaacctctcctttgattgatcagtttggaaacagtctttttgtagaacctgcaaagggatatttgtgagccctttatggcctgtggtgaaatacgaagtatcttcacctaaaaactagacagaagatttctgagaaacttcttggtgatgtgtgccttcatctcacagtgttgaacctttcttttgattgagcagtttggaaagtctttctgtagaatctgcaaatggatatttggagatatttgaggcccgtggtgaaaaaggaagtatcttcacctaaaaaccagacaggagatttctgaaaaacctctttgtgatgtgtgaattcatgtcacagaattcaacctttctttcagttgagcagtttggaaacagtctttggtagaagctgcagagggaaatttcttagctgcttgaggcctatggtgaaaaagaaatatcttcacagaaaaactagacagaagctttctgagaaacttcttcgtgatgtgtccattcatctcacagtgttaaacctttcttttgattgaggagtttggcaaacgtcttttcttagaatctgcgaagggatatttgtgagccctttatggcctttgttgaaatatgaaatatcttcacataaaaagtagacagaagctttctgacaaattccttggtgatgtgcacgtttgccacacggaattgaacccttcttctgattgagcagtttggaatcagtctttttgtagaatctgtgaatgtgtattgagagagttttaaggcctagggtgccaaaggcaatgtcttcacataaaaacgacacagtagctttttgagaaaactctttgtgacatttccattcatctctaatagttggccatttcctttcattgagcagtttggaagcagtctttttctacaaactgcaaagggatatttctgagcggtttggggccaacggtgaaaaataaatatcttcccatgaaaactagacagaagcattttgagaaacttctttttgatgtgtgtattcatctcacagagttgaacctttcttttgatttagcaatctggagaaagtctctaggtcgtttaattggagttatatttgcgagcggtttaaggcctatggtgccaaaggaaatacgttcacataaaatgtagacagaagctttccgagaaactcctttgtgatgtgtgctttcgtctcacagagttgcgcctttcttttgattgaccagtttgggaacattctttttgtagaatctgcaaatggatatttggagcaatttgtggcctacggtgaaaaaggaaatatcttcacataaaaactagacaggagaatcctgagaaacttctttttgatgagtgcattcatttcacatagttgaaacatgctatatgggccagtttggaaacagtcttttggtagagtctgcagacagatatttttgagtggcttaaagactatggtgaaaaaggaaacatcttcacatagcaaccagacagaagcaacctgagaaacttctttgggatgtgttcattcatctcccaatgttgaacgtttcttttgattgagaagtttgtaaagagaacttttgtagaatccgcaaagggatatatgtgagccccctgattcctatggcaaaataggaattatcttgagataaaagcgagacagaagatttctgagaaacttttttgtgatgtgtgctttcatctcacagagttgaaaatttcttttgattgagcagtttggaaacagtcttttcgtatcatctgcaaacggatgtttggaacgctttgtggcctaaggtgaaaatggaaacattcttcacataaaaactagacagaagaattctgaggaacttctttatgatgtgtgcattcatctcagatgggtgaaattttcttttgatggagcagtttggaaaccgtctttttctagtatctgcaaaaggatatttgtgagcggtgtaaggcctatggtggaaaaggaaatatcttcacataaaaaccagacagaagctttctgaggaacttctttgtgaggtgtgcattcatctcaccgtgttgaaactttattttatttgagcagtttagagacagtctttctctgcaatctgcaaaggtctaattctgagccctttgaggtctatggtgaaaaagaaatgtcttcacatttcaactagacagaagcattctgaggaacttctttgtgatgtctccattcatctgacagagttgaaggtttcttttaattcagcactttggaaagcatatttttgtagaatctgcaaagggatatttttgagacatttgaagcctatagtgaaatagtaaatatcttcccatgaaaactagacaggagaattctgagaaacttcattctgatgtgtgcattaacctcacagaatttaacctttcctttgattgagaagtatggaaatggtggtcttttagaatctggaaatggatatttcttagccctttgaggcctatggtgagactggaaatatcatcacatgaaaactagaccgaagctttcggagaaacttctttgagatgtgtgctttcacctcacagagttaaacactttcttttgattgagcagtttggaaacactctttctgtgacatctgtaaatggatattaggagtgctttgaggccaatggtgacaaaggaagtatcttcacataaaaactacacagaagttttctgagaaactacctttcgatgtgtccattaatcaaacagagttaaaactttatttttattgagcagtttggatacagtctttttgtagaatctgcaaaacatatttgtgagccctttattgcctatggtggaataggaatcttcttcacatataaactagacagaagcattctgaggcacttcttcgtgacgtgtgcattcgtctcacatagttgaaactttctttggattgagcagttttgaaacagtccttttgtaggatctgcaaggggatatttctgagccccttgagtactgtgatgcaatgtgaagtatcttcacataaaaacttcacagaggctttctaagaaacttcgttgtgatgtctgctttcctctcacagaattgaaactatcctttgattgaggagtttggaaacactctttttctagaatctgcaaatggatatttggagagcttttgaggcccgtggtgaaaaacgaaataccttcacgtaaaaactaaacagaagctttctgagaaactcccttgcgatgtgtgcattcacctcaccgagtggaaactttcttttgattgagcagattggaaagaggcttattgtacaatctgcaaagggagaattctgatccgtttgaggcttatggtgaaagagaaatatcttcccataagaactagacggaagcattccaagaaattttttatgatgtgtccattcacgtcacagagttgaacctctcctttgattgagcagtttggaaacagtctttttgtagaacctgcaaagggatatttgtgagccctttatggcctgtggtgaaatacgaagtatcttcacctaaaaactagacagaaagtttctgagaaatttcttggtgatgtgtgccttcatctcacagtgttgaacctttcttttgattgagcagtttggaaagtctttctgtagaatctgcaaatggatatttggagatatttgaggcccgtgctgaaaaaggaagtatcgccacctaaaaaccagacagaagatttctgaaaaacctctttgtgatgtgtgaattcatgtcacagaattcaacctttctttcaggtgagcagtttggaaacagtctttggtagaagctgcagagagaaatttcttagctgcttgaggcctatggtgaaaaagaaatatcgtcacagaaaaactagacagaagctttctgagaaacttcttcgtgatgtgtccattcatctcacagagttaaaactttcttttgattgaggagtttggaaaacgtcttttcttagaatctgcgaagggatatttgtgagccctttatggcctttgttgaaatatgaaatatcttcacataaaaagtagacagaagctttctgacaaatttcttggtgatgtgcacgtttgtcacacggaattgaacccttcttctgattgagcagtttggaatcagtctttttgtagaatctgtgaatgtgcatttagagagttttaaggcctagggtgcaaaaggcaatgtcttcacataaaaacgacacagtagattttcgagaaaactctttgtgacatttccattcatctctaatagttgaccatttcctttcattgagcagtttgggagcagtcttttcctacaaactgcaaagggatatttctgagcggtttggggccaacggtgaaaaataaatatcttcccatgaaaactagacagaagcattttgagaaacttctttttgatgtgtgtattcatctcacagagttgaacctttcttttgatttagcaatctggagaaagtctctaggtcgtttaattggagttatatttgtgagcggtttaaggcctatggtgccaaaggaaatacgttcacataaaatgtagacagaagctttccgggaaacttctttgtgatgtgtgctttcgtctcacagagttgcgcctttcttttgattgaccagtttgggaacattctttttgtagaatctgcaaatggatatttggagcaatttgtggcctacggtgaaaaaggaaatatcttcacataaaaactagacaggagaatcctgagaaacttctttttgatgagtgcattcatttcacatagttgaaacatgctatatgggccagtttggaaacggtcttttggtagagtctgcagacagatatttttgagtggcttaaagactatggtgaaaaaggaaacatcttcacatagcaaccagacagaagcaacctgagaaacgtctttgggatgtgttcattcatctcacaatgttgaacgttgctcttgattgagaagtttgtaaggagaacatttgtagaatctgcaaagggatatatgtgagccccttgatttcctatggcaaaataggaatcatcttgagataaaagcgagatagaagatttctgagaaactttttcgtgatgtgtgctttcatctcacagagttgaaaatttcttttcactgagcagtttggaaacagtcttttcgtatcatctgcaaacggatgtttggagcgctttgtggcctaaggtgaaaatggaaacatcttcacataaaaactagacagaagaattctgaggaacttctttatgatgtgtgcattcatctcagataggtgaaattttcttttgatggagcagtttggaaacagtctttttctagtatctgcagaaggatatttgtgagcggtgtaaggcctatggtgaaaaaggaaatatcttcacataaaaaccagacagaagctttctgaggaacttctttgtgaggtgtgcattcatctcaccgtgttgaaactttattttatttgagcagtttagagacagtctttctctgcaatctgcaaaggtctaattctgagccctttgaggtctatggtgaaaaagaaatatcttcccatttaaactagacagaagcattctgaggaacttctttgtgatgtctccattcatctgacagagttgaaggtttcttttaattcagcactttggaaagcatatttttgtagaatctgcaaaaggatatttttgagacatttgaagcctatagtgaaatagtaaatatcttcacatgaaaactagacaggagaattctgagaaacttcattctgatgtgtgcattaacctcacagaatttaacctttcttttgattgagaagtatggaaatggtggtcttttagaatctggaaagggatatttcttagccctttgaggcctatggtgagactggaaatatcatcacatgaaaactagaccgaagctttcggagaaacttctttgagatgtgtgctttcacctcacagagttaaacactttcttttgatggagcagtttggaaacactctttctgtgacatctgtaaatggatattaggagtgctttgaggccaatggtgacaaaggaagtatcttcacataaaaactacacagaagttttctgagaaactactttttgatgtgtccattaacctaacagagttaaaactttctttttattgagcagtttgggtacagtctttttgtagaatctgcaaaacatatttgtgagccctttattgcctatggtggaataggaatcttcttcacatataaagtagacagaagcattctgaggaacgtcttcgtgacgtgcgcattcatctcacatagttgaaactttctttggattgagcagttttgaaacagtccttttgtaggatctgcaaggggatatttctgagcccattgagtactgtgatgcaatgtgaagtatcttcacataaaaactacacagaagctttctaagaaacttcgttgtgatgtgtgctttcatctcacagaattgaaactatcctttgattgaggagtttggaaacactctttttctagaatctgcaaatggatatttggagagcttttgaggcccgtggtgaaaaacgaaatatcttcacgtaaaaactaaacagaagctttctgagaaactcccttgcgatgtgtgcattcacctcaccgagtggaaactttcttttgattgagcagattggaaagaggcttatcgtacaatctgcaaagggagaattctgatccgtttgaggcttatggtgaaagagaaatatcttcccataaaaactagacggaagcattccaagaaattgtttgtgatgtgtccattcacgtcacagagttgaacctctcctttgattgagccgtttggaaacagtctttttgtagaacctgcaaagggatatttgtgagccctttatggcctgtggtgaaatacgaagtatcttcacctaaaaactagacagaaggtttctgagaaacttcttggtgatgtgtgccttcatctcacagtgttgaaccttcttttgattgagcagtttggaaagtctttctgtagaatctgcaaatggatatttggagatatttgaggcccgtggtgaaaaaggaggtatcgtcacctaaaaaccagacagaagatttcttaaaaacctctttgtgatgtgtgaattcatgtcacagaattcaacctttctttcagttgagcagtttggaaacagtctttggtagaagctgcagagggaaatttcttagctgcttgaggcctatggtgaaaaagaaatatcttcacagaaaaactagacagaagctttctgagaaacttcttcgtgatgtgtccattcatctcacagagttaaacctttcttttgattgaggagtttggaaaacgtcttttcttagaatctgcgaagggatatttgtgagccctttatggcctttgttgaaatatgaaatatcttcacataaaaagtagacagaggctttctgacaaatttcttggtgatgtgcacgtttgtcacacggaaattgaacccttcttctgattgagcagtttggaatcagtctttttgtagaatctgtgaatgtgtatttagagagttttaaggcctagggtgcaagaggcaatgtcttcacataaaaacgacacagtggctttttgagaaaactctttgtgacatttccattcatctctaatagttggccatttccttacattgagcagtttggaagcagtctttttctacaaactgcaaagggatatttctgagcggtttggggccaatggtgaaaaataaatatcttcccatgaaaactagacggaagcattttgagaaacttctttttgatgtgtgtattcatctcacagagttgaacctttcttttgatttagcaatttggagaaagtctcttggtagtataagtggagttatatttgcgagcggtttaaggcctatggtgccaaaggaaataccttcacataaaatgtagacagaggatttccgagaaacttctttgtgatgtgtgctttcgtctcacagagttgcgcctttctgttgattgaccagtttgggaacattctttttgtagaatctgcaaatggatatttggagcaatttgtggcctacggtgaaaaaggaaatatcttcacatgaaaactagacaggagactcctgaaaaactactttttgatgagtgcattcgtttcacatagttgaaacatgccatatgggccagtttggaaagagtctttttgtagagtctgcagacagatatttttgagtggcttaaagactatggtgaaaaaggaaacatcttcacatagcaaccagacagaagcaacctgagaaacttctttgggatgtgttcattcatctcccaatgttgaacgtttcttttgattgagaagtttgtaaagagaacttttgtagaatccgcaaagggatatatgtgagccccttgattcctatggcaaaataggaattatcttgagataaaagcgagacagaagatttctgagaaacttttttgtgatgtgtgctctcatctcacagagttgaaaatttcttttgattgagcagtttggaaacagtcttttcgtatcatctgcaaacggatgtttggagcgctttgtggcctaaggtgaaaatggaaacatcttcacataaaaactagacagaagaattctgaggaacttctttatgatgtgtgcattcatctcagatgggtgaaattttcttttgatggagcagtttggaaacagtctttttccagtatctgcaaaaggatatttgtgagcggtgtaaggcctatggtggaaaaggaaatatcttcacataaaaaccagacagaagccttctgaggaacttctttgtgatgtgtgcgttcatctcaccgtgttgaaactctattttatttgagcagtttagagacagtctttctctgcaatctgcaaaggtctaactctgagccctttgaggtctatggtgaaaaagaattgtcttcacatttaaactagacagaagcattctgaggaacttcttcgtgatgtctccattcatctgacagagttcaaggtttcttttaattcagcactttggaaagcatatttttgtagaatctgcaaagggatatttttgagacatttgaagcctatagtgaaatagtaaatatcttcacatgaaaactagacaggagaattctgagaaacttcattctgatgtgtgcattaacctcaccgaatttaacctttcttttgattgagaagtatggaaatggtggtcttttagaatctggaaagggatatttcttagccctttgaggcctatggtgagactggaaatatcatcgcatgaaaactagaccgaagctttcggagaaacttctttgagatgtgtgctttcacctcacagagtaaaacactttcttttgattgagcagtttggaaacactctttctgtgacatctgtaaatggatattaggagtgctttgaggccaatggtgacaaaggaagtatcttcacataaaaactacacagaagttttctgagaaactacttgttgatgtgtccattgatgtaacagagttaaaactttctttttattgagcagtttggatacagtctttttgtagaatctgcaaaaatatttgtgagccctttattgcctatggtgaaagaggaatcttcttcacatgtaaacaagacagaagcattctgaggaacgtcttcgtgacgtgcgcattcatctcacatagttgaaactttctttggattgagcagttttgaaacagtccttttgtaggatctgcaaggggatatttctgagcccattgagtactgtgatgcaatgtgaagtatcttcacataaaaactagacagacgctttctaagaaacttcgttgtgatgtgtgctttcgtctcacagaattgaaactatcctttgattgaggagtttggaaacactctttttctagtgtctgcaaatggatatttggagagcttttgaggcccgtggtgaaaaacgaaatatcttcacgtaaaaactaaacagaagctttctgagaaactcccttgcgatgtgtgcattcacctcaccgagtggaaactttcttttgattgagcagattggaaagaggcttatcgtacaatctgcaaagggagaattctgatccgtttgaggcctatggtgaaagagaaatatcttcccataagaactagacggaagcattccaagaaattttttgtgatgtgtccattcacgtcacagagttgaacctctcctttgattgggcagtttggaaacagtctttttgtagaacctgcagagggatatttgtgagccctttatggcctgtggtgaaatacgaagtatcttcacctaaaaactagacagaaggtttctgagaaacttcttggtgatgtgtgccttcatctcacagtgttgaacctttcttttgattgagcagtttggaaagtctctctgtagaatctgcaaatggatatttggagatatttgagtcccgtgctgaaaaaggaagtatcgtcacctaaaaaccagacagaagatttctgaaaaacctctttgtgatgtgtgaattcatgtcacagaattcaacctttctttcagttgagcagtttggaaacagcctttggtagaagctgcagagggaaatttcttagctgcttgaggcctatggtgaaaaagaaatatcttcacagaaaaactagacagaagctttctgagaaacttcttcgtgatgtgtccattcatctcacagagttaaacctttcttttgattgaggagtttggaaaacgtcttttcttagaatctgcgaagggatatttgtgagccctttatggcctttgttggaatatgaaatatcttcacataaaaagtagacagaaagctttctgacaaattccttggtgatgtgcacgtttgtcacacggaattgaacccttcttctgattgagcagtttggaatcaatctttttgtagaatctgtgaatgtgtatatagagagttttaaggcctagggtgccaaaggcaatgtcttcacataaaaacgacacagtagctttttgagaaaactctttgtgacatttccattcatctctaatagttgaccatttcctttcattgagcagtttggaagcagtctttttctacaaactgcaaagggatatttctgagcggtttggggccaacggtgaaaaataaatatcttcccatgaaaactagacagaagcattttgagaaacttctttttgatgtgtgtattcatctcacagagttgaacctttcttttgatttagcaatttggagaaagtctcttggtagtataagtggagttatatttgcgagcggtttaaggcctatggtgccaaaggaaataccttcacataaaatgcagacagaggctttccgagaaacttctttgtgatgtgtgctttcgtctcacagagttgcgcctttcctttgattgaccagtttgggaacattctttttgtagaatctgcaaatggatatttggagcaatttgtggcctacggtgaaaaaggaaatatcttcacataaaaactagacaggagaatcctgagaaacttctttttgatgagtgcattcatttcacatagttgaaacatgctatatgggccagtttggaaacagtcttttggtagagtctgcagacagatatttttgaggggcttaaagactatggtgaaaaaggaaacatcttcacatagcaaccagacagaagcaacctgagaaacgtctttggaatgtgttcattcatctcacaatgttgaacgtttcttttgattgagaagtttgtaaggagaacatttgtagaatctgcaaaggggtatatgtgagccccttgattcctatggcaaaataggaattatcttgagataaaagcgagacagaagatttctgagaaacttttttgtgatgtgtgctttcatctcacagagttgaaaattaatcttgattgagcagtttggaaacagtcttttcgtatcatctgcaaacggatgtttggggcgctttgtggcctaaggtgaaaatggaaacatcttcacataaaaactagacagaagcaattctgaggaacttctgtatgatgtgtgcattcatctcagataggtgaaattttcttttgatggagcagtttggaaacagtctttttatagtatctgcagaaggatattcgtgagcggtgtaaggcctatggtgaaaaaggaaatatcttcacattaaaaccagacagaagccttctgaggaacttctttgtgatgtgtgcgttcatctcgccgtgttgaaactttattttatttgagcagtttagagacagtctttctctgcaatctgcaaaggtctaactctgagccctttgaggtctatggtgaaaaagaaatgtcttcacatttaaactagacagatgcattctgaggaacttcttcgtgatgtctccattcatctgacagagttgaaggtttcttttaattcagcactttggaaagcatatttttgtagaatctgcaaagggatatttttgagacatttgaagcctatagtgaaatagtaaatatcttcacgtgaaaactagacaggagaattctgagaaacttcattctgatgtgtgcattaacctcacagaatttaacctttcttttgattgagaagtatggaaatggtggtcttttagaacctggaaagggatatttcttagccctttgaggcctatggtgagactggaaatatcatcacatgaaaactagaccgaagctttcggagaaacttctttgagatgtgtgctttcacctcacagagttaaacactttcttttgattgagcagtttggaaacactctttctgtgacatctgtaaatggatattaggagtgctttgaggccaatggtgacaaaggaaatatcttcacataaaaactacacagaagttttctgagaaactacttgttgatgtgtccattaatgtaacagagttaaaactttctttttattgagcagtttggatacagtctttttggagaatctgcaaaaaatatttgtgagccctttattgcctatggtgaaataggaatcttcttcacatgtaaacaagacagaagcattctgaggaacatcttcgtgacgtgcgcattcatctcacatagttgaaactttctttggattgagcagttttgaaacagtccttttgtaggatctgcaaggggatatttctgagaccattgagtactgtgatgcaatgtgaagtatcttcacataaaaactacacagacgctttctaagaaacttcgttgtgatgtgtgctttcgtctcacagaattgaaactatcctttgattgaggagtttggaaacactctttttctagaatatgcaaatggatatttggagagcttttgaggcccgtggtgaaaaacgaaatatcttcacgtaaaaactaaacagaagctttctgagaaactcccttgcgttgtgtgcattcacctcaccgagtggaaactttcttttgattgagcagattggaaagaggcttatcgtacaatctgcaaagggagaattctgatccgtttgaggcttatggtgaaagagaaatatcttcccataaaaactagacggaagcattccaagaaattttttgtgatgtgtccattcacgtcacagagttgaacctctcctttgattgggcagtttggaaacagtctttttgtagaacctgcaaagggatatttgtgagccctttatggcctgtggtgaaatacgaagtatcttcacctaaaaactagacagaaggtttctgagaaacttcttggtgatgtgtgccttcatctcacagtgttgaacctttcttttgattgagcagtttggaaagtctttctgtagaatctgcaaatggatatttggagatatttgaggcccgttttgaaaaaggaagtatcttcacctaaaaaccagacaggagatttctgaaaaacctctttgtgatgtgtgaattcatgtcacagaattcaacctttctttcacttgagcagtttggaaacagtctttggtagaagctgcagagggaaatttcttagctgcttgaggcctatggtgaaaaagaaatatcttcacagaaaaactagacagaagctttctgagaaacttcttcatgatgtgtccattcatcacacagagttaaacctttcttttgattgaggagtttggaaaacgtcttttcttagaatctgcgaagggatatttgtgagccctttatggcctttgttgaaatatgaaatatcttcacataaaaagtagacagaggctttctgacaaatttcttggtgatgtgcacgtttgtcacacggaattgaacccttcttctgattgagcagtttggaatcagtctttttgtagaatctgtgaatgtgtatttagagagttttaaggcctagggtgcaagaggcaatgtcttcacataaaaacgacacagtagctttttgagaaaactctttgcgacatttccattcatctctaatagttgaccatttcctttcattgagcagtttggaagcagtctttttctacaaactgcaaagggatatttctgagcggttttgggccatcggtgaaaaataaatgtcttcccatgaaaactagacagaagcattttgagaaacttctttttgatgtgtgtattcatctcaaagagttgaacctttcttttgatttagcaatttggagaaagtctcttggtagtataagtggagttatatttgcgagcggtttaaggtctatggtgccaaaggaaataccttcacataaaatgcagacagaggctttccgagaaacttctttgtgatgtgtgctttcgtctcacagagttgcgcctttcttttgattgaccagtttgggaacattctttttgtagaatctgcaaatggatatttggagcaatttgtggcctacggtgaaaaaggaaatatcttcacataaaaactagacaggagaatcctgagaaacttctttttgatgagtgcattcatttcacatagttgaaacatgctatatgggccagtttggaaacagtctttttgtagagtctgcagacaggtatgtttgagtggcttaaagaccatggtgaaaaaggaaacatcttcacatagcaaccagacagaagcaacctgagaaacgtctttgggatgtgttcattcatctcacaatgttgaacgtttcttttgattgagaagtttgtaaggagaacatttgtagaatctgcaaaggggtatatgtgagccccttgattcctatggcaaaataggaattatcttgagataaaagcgagacagaagatttctgagaaacttttttgtgatgtgtgctttcatctcacagagttgaaaatttcttttgattgagcagtgtggaaacagtcttttcgtatcatctgcaaatggatgtttggggcgctttgtggcctaatgtgaaaatggaaacaccttcacataaaaactagacagaagaattctgaggaacttctgtatgatgtgtgcattcatctcagataggtgaaattttcttttgatggagcagtttggaaaccgtctttttatagtatctgcagaaggatattcgtgagcggtgtaagacctatggtgaaaaaggaaatatcttcacataaaaaccagacagaagctttctgaggaacttctttgtgatgtgtacattcatctcaccgtgttgaaactttattttatttgagcagtttagagacagtctttctctgcaatctgcaaaggtctaattctgagccctttgaggtctatggtgaaaaagaaatatcttcacatttaaactagacagaagcattctgaggaacttcttcgtgatgtctccattcatctgacagagttgaaggtttcttttaattcagcactttggaaagcatatttttgtagaatctgcaaagggatatttttgagacatttgaagcctatagtgaaatagtaaatatcttcacgtgaaaactagacaggagaattctgagaaacttcattctgatgtgtgcattaacctcacagaatgtaacctttcttttgattgagaagtatggaaatggtggtcttttagaatctggaaagggatatttcttagccctttgaggcctatggtgagactggaaatatcatcacatgaaaactagaccgaagctttcggagaaacttctttgagatgtgtgctttcacctcacagagttaaacactttcttttgatggagcagtttggaaacactctttctgtgacatctgtaaatggatattaggagtgctttgaggccaatggtgacaaaggaagtatcttcacagaaaaactacacagannnnnnnnnnnnnnnnnnnnnnnnnnnnnnnnnnnnnnnnnnnnnnnnnnnnnnnnnnnnnnnnnnnnnnnnnnnnnnnnnnnnnnnnnnnnnnnnnnnnagctttctgagcaaacttctttgtgatgtgtgcattcatctcacagtgttgaaactttattttatttgagcagtttagagacagactttttctgcaatctgcaaaggtatatttctgagccatttgaggtctgtggtgaaaaaggaatatcttcacatttaaactagacagaagaattctgagaaacttctttatgatgtgtgcattcatctcaggtaggtgaaattttcttttgatggagcagtttggaaacagtctttttctagtatctgcagaaggatatttgtgagcggtgtaaggactacgctgaaaaaggaaatatcttcacataaaaactagacagaagatttctgagaaacttttttgtgatgggtgctttcatctcacagagttgaaaatttcttttgattgagcagtttggaaacagtcttttcgtatcatctgcaaagggatgtgtggagcgctttgtggcctaacgtgaaaatggaaatatcttcacataaaatctagacagaagcattctgagaaacttctttgtgatgtgttcattcatctcacaatgttgaacgtttcttttgattgagaggtttgtaaacacaacttttgtagaatctgcaaagggatatttgtgagccccttgattcctatggcaaaataggaattatcttgtcataaaaactagacaggagaattctgagaaacttctctttgatgagtgcattcatttcacatagttgaaacatgctatatgggccagtttggaaacagtctttttgtagggtctgcagacagatatttttgagtggcttaaagactgtggtgaaaaaagaaatatcttcacagagtaaccagacagaagctttctgagaaacttctttatgatgtgtgctttcgtctcagagagttgagcctttctgttgattgaccagtttggaaacattctttctgtagaatccgcaaatggatatttggagcaatttgcggcctacggtgaagaaggaaatatcttcacataaaaactagacagaagcattttgagaaacttctttttgatgtgtgtattcatctcacagagttgaacgtttcttttgatttagcgatttggagaaagtctcttggtagtataagcggagttatgtttgtgagtggtttaaggcctacggtgccaaaggaaataccttcacataaaatgtagacagaagcattttgagagaactccttgtgacatttccattcatctctaatagttgaccatttcttctcattgagcagtttggaaacagtcttttcctacaaactgcaaagggatatttctgagccgtttggggccaatggtgaaaaataaatatcttcacatgaaaactaggcagaagctttctgagaaactcctttgtggtgtgcacgtttgtatcacagagttgaacctttcatttgattgagcagtttggaaacagtctttttgtagaatctgcaaatgtatatttggagtgttttaaggcctatagtgaaaaaggaaatatcttcacataaaaactacacagtagctttctgagaaacttctttgtgatgtgtcccttcatcgcacagagtgaaacctgtcttttgatttaggagtttgaaaaatgtcttttcttagaatctgcaaagggatatttgtgagccctttatggcctttgttgaaatatgaaatatcttcacgtaaaaagtagagagaaagatttctgaaaaacctctttgtgatgtgtgaattcatgtcacagaattcaaccttcctttcagttgagcagtttggaaccagtcttttgtagaagctgcagagggaaatttcttagctgcttgaggcctatggtgaacaagaaatagcctcacataaaaactagacagaagatttctgagaaacttctttgtgatgtgtgccttcaactcactgtgttgaaactttcttttgattgagcagtttgggaagtctttctgtagaatctgcaaatggatatttggagatatttgaggcccttggtgaaaaaggaagtatcttcacataaaaactagacagaatcattccaagaaatttcctgcgatgtgtccattcacgtcacagagttgaacctttcttttgattgagcagtttggaaacagtctttttgtagaacctgcaaagggatatttgtgagccccttatggcctgtggtgaaatacgaaatatcttcacataaaaactagacaggagctttctgagaaactcccttgcgatgtgtgtattcacctcaccgagtggaaactttcttttgattgagcagattggaaagagacttatcgtacaatctgcaaagggagaattctgatccgtttgaggctaatggtgaaagagaaacatcttcccataaaaactagacggaagctttctaagaaacttcggtgtgatgtgtgttttcatctcacggaattgaaactttcttttgattgaggagtttggaaacactctttttctagaatctgcaaatggatatttggagagctcctgaggcccatgttgaaaaacgaaacatcttcacgtaaaaactaaacagaagcattctgaggaacttctttgtgatgtgtgcattcatctcacatagttgaaactttctttggattgagcagttttgaaacagtctttttgtagaatctgccaagggatatttctgagcccattgagtactatgatgcactgtgaagtatcttcacataaaaactagacagaagttttctgagaaactacttttcgatgtgtccattaatcaaacagagttaaaactttctttttattgagcagtttggatacagtctttctttagaatctgcaaaaaatatttgcgagccctttattgcctatggtgaaataggaatcttcttcacatataaactggacagaagctttctgagaaactcctttgagatgtgtgttttcacctcactgagttaaacactttcttttgattgagctgtttggaaacactctttttgtgaaatctgtaaatggatattaggagtgctttgaggccaatggtgacaaaggaaatatcttcacataaaaactaaacagaagaattctgagaaacttcattctgacgtgggcattaacctcagagaatttaacctttcttttgattgagaagtatggaaacggtcgtcttttaaaatctggaatgggatatttcttagccctttgaggcctacggtgaaactggaaatatcttcacatgaaaagtagaccgaagcattccgaggaacttctttgtgatgtctctattcatctgacagatttgaaggtttcttttaattcagcactttggaaagcatatttttgtagaatctgcaaagggatatttttgagacctttgaagcctatagtgaaatagtaaatatcttcacatagaaactagacaggagctttctgagaaacttctttgtgatgtgtgcattcatctcacagtgttgaaactttattttatttgagcagtttagagacagtctctttctacaatctgcaaaggtatatttctgagccatttgaggtctgtggtgaaaaaggattatcttcacatttaaactagacagaagaattctgagaaacttttttaagatgtgtgcattcagctcaggtaggtgaaattttcttttgagggagcagtttggaaacagtctttttctagtatctgcagaaggatatttgtgagcggtgtaaggactatggtgaaaaaggaaatatcttcacataaaaactagacagaagatatctgagaaacttttttgtgatgggtgctttcatctcacagagttgaaaatttcttttgattgagcagtttggaaacagtcttttcgtatcatctgcaaagggatgtttggagcgctttgtggcctaaggtgaaaatggaaatatcctcacataaaattctagacagaagcattctgagaaacttctttgtgatgtgttcattcacctcacaatgttgaacgtttcttttgattgagaggtttgtaaacagaacttttgtagaatctgcaaagggatatttgtgagccccttgattcctatggcaaaataggaattctctttagataaaaactagacagaagaattctgagaaacttctctttgatgagtgcattcatttcacattgttgaaacatgctatatgggccattttggaaacagtctttttgtagtgtctgcagacagatatttttgagtggcttaaagactgtggtgaaaaaagaaatatcttcacagagtaaccagacagaagctttctgagaaacttctttgtgatgtgtgctttcgtctcacagagttgagcctttctgttgattgaccagtttggaaacattctttctgtagaatccgcaaatggatatttggaacaatttgcggcctacggtgaagaaggaaatatcttcacataaaaactagacagaagcattttgagaaacttctttgtgatgtgtgcattcttctcaaagagttgaaactttcttttgatttagcaatttggagaaagtctcttggtagtataagtggagttatatttgtgagcggtttaaggcctatggtgcaaaaggaaatactttcacatgaaatgtagacagaagctttatgtgaaaactctttgtgacatttccattcatctctaatagttgaccatttcttttcattgagcagtttggaaacagtcttttcctacaaactgcaaagggatatttctgagccgtttggggccaatggtgaaaaataaatatcttcccatgaaaactagacagaagctttctgacaaatttcttggtgatgtgcacgtttgtcacacggaattgaacccttcttctgattgagcagtttggaatcagtctttttgtagaatctgtgaatgtgtatttagagagttttaaggcctagggtgcaaaaggcaatgtcttcacataaaaacgacacagtagctttctgagaaacttctttgtgatgtgtccattcatcgcacagagtgaaacctttcttatgattgaggagtttggaaaatgtctttccttagaatctgcaaagggatatttgtgagccctttatggcctttgttgaaatatgaaatatcttcacataaaaagtagacagaagatttctgaaaaacctctctgtgatgtgtgaattcatgtcacagaattcaaccttcctttcagttgagcagtttggaaccagtcttttgtagaagctgcagagggaaatttcttagctgctcgaggcctatggtgaacaagaaatagcctcacataaaaagtagacagaagtattttgagaaacttctttgtgatgtgtgctttcatttcacagagttgaatctttcttttgattgagcagcttggaaacagtctttttgtacaagctgcaaagggatatttctgagccatttgaggcttatggtgaaaacgaaatatctgcacataaaaacctgacagaatcattccaagaaattgtttgtgatgtgtccattcacgtcacagagttgaacctttcttttgattgagcagtttggcaacagactttttgtggaacctgcaaagggatatttgtgagccccttatggcctgtggtgaaatacgaaatatcttcacataaaaactagacaggagctttctgagaaactcccttgtgatgtgtgcattcacctcacagagttgaaactttcttttgattgagcagattggaaagaggcttattgtacaatctgcaaagggagaattctgatccttttgaggcttctggtgaaagagaaacatcttcccataaaaactagacggaagctttctaagaaacttcggtgtgatgtgtgctttcatctcacagaattgaaactttcttttgattgaggagtttggaaacactctttttctagaatctgcaaatggatatttggagagcttttgaggcccatgttgaaaaacgaaacatcttcacgtaaaaacgaaacagaagcagtctgagaaacttctttgtgatgtatgcattcatctcacatagttgaaactgtctttggattgagcagtttggaaacagtcctcttgtagaatctgcaaagggatatttctgagcccattgagtactatggtgcaatgtgaaatatcttcacataaaaactagacagaagttttctgagaaactacttttcgatgtgtccattaatcaaacagagttaaaactttctttttattgagcagtttggatacagtctttctgtagaatctgcaaaaaatatttgcgagccctttattgcctatggtgaaataggaatcttcttcacatataaactggacagaagctttctgagaaacttcattgagatgtgtgctttcacctcacagagttaaacactttcttttgattgagctgtttggaaacactcttttcgtgaaatctgtaaatggatattaggagtgctttgaggccaatggtggcaaaggaaatatcttctcataaaaactaaagagaagaattctgagaaacttcattctgatgtgtgcattcacctcacagaatttaagctttcttttgattgagcagtatggaaatggttgtcttttagaatctggaaagggatatttcttagccctttgaggcctacggtgaaactggaaatatctttacatgaaaactagaccaaagcattctgaggaacttctttgtgatgtcttcattcatctgacagagttgaaggtttcttttaattcacacttttgaaaccatatttttgtagaatctgcaaagggatatttttgagacatttgaagcttatagtgacatagtaaatattgtcacataaaaactagacaggagctctctgagaaacttctttgtgatgtgtgcattcatctcacagtgttgaaactttattttatttgagcagtttagagacagtctttttctgcaatctgcaaaggcatatttctgagccatttgaggtctgtggtgaaagagaaatatcttcacatttaaactagacagaagaattctgagaaacttctttgtgatgagtctattcatctcacagagttgaaacattctttgatggaccagtttggaaacagtctttttatagtatctgcagagggatatttttgagcggtttaaagactatggtgaaaaaggaaatatcttcacataataactagacagaagatttctgagaaacttttctgtgatgtgtgctttcatctcacagagttgaaaatttcttttgattgagcagtttggaaacagtcttttcgtatcatctgcaaagggatgtttggagcgctttgtggcctgaggtgaaaatgcaaatatcttcacataaaatctagacagaagcattctgagaaacttctttgtgatgtgttcattcatctcacaatgttgaacgtttcttttgattgagaggtttgtaaacagaacttttgtagaatctgcaaagggatatttgtgagccccttgattcctatggcaaaatagtaattatcttgagataaaaactagacaggagaattcttagaaacttctctttgatgagtgcattcatttcacatagttgaaacatgctatatgggccagtttggaaacagtctttttgtagtgtctgcagacagatatttttgagtggcttaaagactgtggtgaaaaaagaaatatcttaacagaataaccagacagaagctttctgagaaacttctttgtgatgtgtgctttcgtctcacagagttgagcctttctgttgattgaccagtttggaaacattatttctgtagaatccgcaaatggatatttggagcaatttgcggcctatggtgaagaaggaaatatcttcacataaaaactagacagaagcattttgagaaacttctttttgatgtgtgtattcatctcacagagttgaacgtttcttttgattttgcaatttggagaaagtctcttggtagtataagcagagttatgtttgtgagtggtttaaggcctacggtgccaaaggaaataccttcacataaaatgtagacagaagctttttgagaaaactctttgtgacatttccattcatctctaatagttgaccatttcttttcattgagcagtttggaaacagtcttttcctacaaactgcaaagggatatttctgagccgtttggggtcaatggtgaaaaataaatatcttcacatgaaaactagacagaagctttctgacaaatttctttgtgatgtgcacgtttgtcacacggaattgaacctttcttctgattgagcagtttggaatccgtctttttgtagaatctgtgaatgtatatttagagagttttaaggcctagagtgaaaaaggaaacgtcttcacataaaaacgacacagtagctttctaagaaacttctttgtgatgtgtccattcatctcacagagttaaacctttcttttgattgaggagtttggaaaatgtcttctcttagaatctgcaaagggatatttgtgagccctttatggcctatgttgaaatatgaaatatcttcacataaaaactagacagaagatttctgaaaaacttctttgtgatgtgtgaattcatgtcacagaattcaacctttctttcgattgagcagtttggaaacagtcttttgtagaagctgcaaagggaaatttcttagccgtttgaggcctatagtgaaaaagaaatatcttcacataaaaactagacagaagatttctgagaaacttctttgtgatgtgtgccttcatctcactgtgttgaacctttcttttgattgagcagtttgggaagtctttctgtagaatctgcaaatggatatttggagatatttgaggcccttggtgataaaggaagtatcttcacataaaaactagacagaatcattccgagaaattttttgtgatgtgtccattcacgtcacagagttgaacctttcctttgattgagcagtttagaaacagtctttgtgtagaacctgcaaacagatatttgtgagccccttatggcctgtggtgaaatatgaaatatcttcacataaaaactagacaggagctttctgagaaactcccttgtgatgtgtgcattcacctcacagagttgaaactttcttttgattgagcagattggaaagaggcttattgtacaatctgcaaagggagaattctgatccgtttgaggctaatggtgaaagagaaacatacttcccataaaaactagacggaacgctttctaagaaacttcgttgtgatgtgtgctttcgtctcacagaattgaaactatcctttgattgaggagtttggaaacactctttttctagaatatgcaaatggatatttggagagcttttgaggcccgtggtgaaaaacgaaatatcttcacgtaaaaactaaacagaagcattctgaggaacttctttgtgatgtgtgcattcatctcacatagttgaaactttctttggattgagcagttttgaaacagtccttttgtagaatctgccaagggatatttctgagcccattgagcactatgatgcactgtgaagtatcttcacataaaaactagacagaagtttcctgagaaactactctttgatgtgtccattaatctaacagagttgaaactttctttttattgagcagtttggatacggtctttttgtagaatctgcaaaaaatatttgtgagccctttattgcctatggtgaagtaggaattttcttcacatataaactagacagaagctttctgagaaacttctttgagatgtgtgctttcacctcacagagttaaacactttcttttgattgagctgtttggaaacactctttttgtgaaatctgtaaatggatattaggagggctttgaggccaattgtgacaaaggaaatatcttcacgtaaaaactaaacagaagaattctgaaaactttcattctgacgtgggcattaacctcagagaatttaactttcttttgattgagaaatatggaaacggtcgtcttttagaatctggaaagggatatttcttagccctttgaggcatatggtgaaactggaaatatcttcacatgaaaagtagaccgaagcattctgaggaacttctttgtgaggtctccattcatctgacagagttgaaagtttcttttaattcagcactttggaaaccatatttttgtagaatctgcaaagggatatttttgagacatttgaagcctatagtgaaatagtaaatatcttcacataaaaactagacaggagctttctgagaaacttctttgtgatgtggtgcattcatctcacagtgttgaaactttattttgtttgagcagttcagaaacagtctttttctgcaatctgcaaaggtatatttctgagacatttgaggtctatggtgaaaaagagatatcttcacattttaactagacagaagaattctgagaaacttctttatgatgtgtgcattcatctcaggtaggcgaaattttcttttgatggagcagtttggaaacagtctttttctagtatctgcagaaggatatttgtgagcggtgtaaggactatggtgaaaaaggaaatatcttcacataaaaactagacagaagatttctgagaaacttttttgtgatggttgctttcatctcacagagttgaaaatttcttttgattgagcagtttggaaacagtcttttcgtatcatctgcaaagggatgtgtggagcgctctgtggcctaaggtgaaaatggaaatatcttcacataaaatctagacagaagcattctgagaaacttctttgtgatgtgttcattcatctcacaatgttgaaggtttcttttgattgagaggtttgtaaacagaacttttgtagaatccgcaaagggatatttgtgagccccttgattcctatggcaaaataggaataatcttgagataaaaactagacagaagctttctgagaaacttctttgtgatgtgtgcattcatcacacagtgttgaaactttattttgtttgagcagtttagaaacagtcttttactgcaatctgcaaaggtatatttctgagccatttgaggtctatggtgaaaaagaaatatcttcacattgaaactagacagaagctttctgagaaactttgtaatgtgtgtttttgtctcacagatttgagcctttcttttgattgaccagtttggaaacattctttttgtagaatctgcaaatggatatttggaacaatttgagacctatggtgaaaaaggaaatatcttcacataaaaactagacagaagcattttgagaaacttctttgtgatgtgtgcattcttctcacagagttgaacctttctttggatttagcaatttggagaaagtctcttggtagtacaagtggagttatatttgtgagcgatttaaggcctatggtgcaaaaggaaacaccttcacataaaaagtagacagaagctttttgaggaaactctttgtgacatttccattcatctctaatagttgaccatttcttttcattgagcagtttggaaacagtcttttcctacaaactgcaaagggatatttctgagtcgtttggggccaatggtgaaaaataaatatcttcacatgaaaactagacagaagctttctgacaaatttctttgtgatgtgcaccgtttgtcacacggagttgaacctttcttctgattgagcagtttggaatcagtctttttgtagaatctgtgaatgtatatttagagagttttaaggcctagagtgaaaaaggaaacgtcttcacataaaaacgacacagtagctttctaagaaacttccttgtgatgtgtccattcatctcacagagataaacctttcttttgatcaaggagtttgggaaatgtcttttcttagaatctgcaaagggatatttgtgagccctttatggcctatgttgaaatatgaaatatcttcacataaaaactagacagaagatttctgaaaaacctctttgtgatgtgtgaattcatgtcacagaattcaaccttcctttcagttgagcagtttggcaccagtcttttgtagaacctgcagagggaaatttcttagctgcttgaggcctatggtgaacaagaaatagcctcacataaaaagtagacagaagatttctgagaaacttctttgtgatgtttgctttcgtctcacagtgttgaacctttcttttgattgagcagtttggaaagtctttttgtagaatctgcaaatggatatttggagctatttgaggcccatggtgaaaaaggaagtatcttcacataaaaactagacagaatcattccgagaaattttttgtgatgtgtccattcacgtcacagagttgaacctttcttttgattgagcagtttggaaacagtctttttgtagaacctgcaaagggatatttgtgagccccttatggcctgtggtgaaatacgaaatatattcacataaaaactagacaggagctttctgagaaactcccttgtgatgtgtgcattcacctgacagagttgaaactttcttttgaatgagcagattggaaagaggcttattgtacaatctgcaaagggagaattctgatccgtttgaggcttctggtgaaagagaaacatcttcccacaaaatctagacggaagctttctaagaaacttcgttgtgatgtgtgctttcatctcacagaattgaaactttcttttgattgaggagtttggaaaccctctttttctagaatctgcaaatggataattggagagcttttgaggcccatgttgaaaaacgaaacatcttcacgtaaaaactaaacagaagcattctgagaaacttctttgtgatgtgtgcattaatctcacagagttgaaactttctttggattgagcagtttggaaacagtctttttgtagaatctgcaaagggatatttctgagtccattgagtactatggagaaatgtgaaatatcttcacataaaaactagacagaagttttctgagaaactactcttttatgtgtccattaatctaacagagttgaaactttctttttattgagcagtttggatacggtctttttgtagaatctgcaaaaaatatttgtgagccctttattgcctatggtgaagtaggaattttcttcacatataaactagacagaagctttctgagaaacttcttggagatgtgtgctttcacctcacagagttaaacactttcttttgattgagctgtttggaaacactctttttgtgaaatctgtaaatggatattaggagtgcttcgaggccaatggtgacaaaggaaatatcttcacataaaaactaaacagaagaattctgagaaacttcattctgacgtgggcattaaactcagagaatttaacctttcttttgattgagaagtatggaaacggtcgtcttttagaatctggaaagggatatttcttagccctttgaggcctacggtgaaactggaaatatcttcacatgaaaagtagaccgaagaatactgagtaacttctttgtgatgtctccattcatctgacagagttgaaggtttcttttaattcagcactgtggaaaccgtatttttgtagaatctgcaaagggatatttttgagacctttgaagcctatagtgaaatagtaaatatcttcacatagaaactagacaggagatttctgagaaacttctttgtgatgtgtgcattcatctcacagtgttgaaactttattttgtttgagcagtttagaaacagtcttttcctgcattctgcaaaggtgtatttctgagccatttgaggtctatgtgaaaaagaaatatcttcacatttaaactagacagaagaattctgagaaacttctttgtgatgtgtgcattcatctcagagaggtgaacttttcttttgatggagcagtttggaaacagtatttttttagtatctgcagaaggatatttgtgagcagtttaaggcctatggtgaaaaaggaaatatcttcacataaaaactagacaggagatttctgagaaacttttttgtgatgagtgctttcatctcacagagttgaaaatttcttttgattgagcagtttggaaacagtcttttcgtatcatctgcaaagggatgtttggagcgctttgtggcctaaggtgaaaatggaaatatcttcacataaaatctagacagaagcattccgagaaacttctttgtgatgtgtgcattcatctcacaatgttgaacgtttcttttgattgagcagtttggaaacagaacttttgtagaatctgcaaagggatatttgtgagcccattgattcctatggcaaaataggaattatcttgagataaaaactagacagaagaattcggagaaacttctctttgatgagtgcattcatttcacatagttgaaacatgctatatgggccagtttgaaaacagactttttgtagtgtctgcagacagatatttttgagtggcttaaagactgtggtgaaaaaagaaatatcttcacagagtaaccagacagaggctttccgagaaacttctttgtgatgtgtgctttcgtctcacagagttgcgcctttcttttgattgaccagtttgggaacattctttttgtagaatctgcaaatggatatttggagcaatttgtggcctacggtgaaaaaggaaatatcttcacagaaaaactagacaggagcattttgagaaacttctttttgatgtgtgtattcttctcacagagttgaacgtttcttttgatttagcaatttggagaaagtctcttggtagtataagcggagttatgtttgtgagtggtttaaggcctacggtgccaaaggaaataccttcacataaaatgtagacagaagctttttgagaaaactctttgtgacatttccattcatctctaatagttgaccatttcttttcattgagcagtttggaaacagtcttttcctacaaactgcaaagggatatttctgagccgtttggggccaatggtgaaaaataaccatcttcacatgaaaactagacataaggtttctgacaaatttctttgtgatgtgcacgtttgtcacacggaattgaacctttcttctgattgagcagtttggaatcagtctttttgtagaatctgtgaatgcatatttagagagttttaaggcctagagtgaaaatggaaacgtcttcacataaaaacgacacagtagctttctgagaaacttctttgtgatgtgtccattcatcgcacagagtggaacctttcttttgattgaggagtttggaaaatgtcttttcttagaatctgcaaagggatatttgtgagccctttatggcctttgttgaaatatgaaatatcttcacataaaaagtagacagaagatttctgaaaaacctctttgtgatgtgtgaattcatgtcacagaattcaaccttcctttcagttgagcagtttggaaccagtcttttgtagaagctgcagaggaaatttcttagctgcttgaggcctatggtgaacaagaaatagcctcacataaaaactagacagaagatttctgagaaacttctttgtgatgtgtgccttcatctcactgtgttgaacctttcttttgattgagcagtttgggaagtctttctgtagaatctgcaaatggatatttggagatatttgaggcccttggtgaaaaaggaagtatcttcccacaaaaactagacagaatcattccaagaaattttctgtgatgtgtccattcacgtcacagagttgaacctttcttttgattgagcagtttggaaacagtctttttgtagaacctgcaaagggatatttgtgagccccttatggcctgtggtgaaatacgaaatatcttcacataaaaactagacaggagctttctgagaaactcccttgtgatgtgtgcattcacctcagagagttgaaactttcttttgattgagcagattggaaagaggcttattgtacaaactgcaaagggagaattctgatccgtttgaggcttatggtgaaagagaaacatcttcccataaaaactagacggaagctttctaagaaacttctttgtgatgtgtgctttcatctcacagaattgaaactttcttttgattgaggagtttggaaacactctttttctagaatctgcaaatggatatttggagagcttttgaggcccatggtgaaaaacgaaatatcttcacataaaaactaaacagaagcattctgaggaacttctttgtgatgtgtgcattcatctcacatagttgaaactttctttgaattgagcagttttgaaacactccttttgtagaatctgccaagggatatttctgagcccattgagtactatgatgcactgtgaagtatcttcacataaaaactagacagaagttttctgaaaaactacttttcgatgtgtccattaatcaaacagagttaaaactttctttttattgagcagtttggatacagtctttttgtagaatctgcaaaaaatatttgcgagccctttattgcctatggtgaaataggaatcttcttcacatataaactagacagaagcttactgagaaacttctttgagatgtgtgctttcacctcacagagttaaacactttcttttgattgagctgtttggaaacactctttttgtgaaatctgtaaatggatattaggagtgctttgaggccaattgtgacaaaggaaatatcttcacataaaaactaaacagaagaattctgagaaacttcattctgatgtgtgcattaacctcacagaatgtaacctttcttttgattgagaagtatggaaacggtcgtcttttagaatctggaaagggatatttcttagccctttgaggcctacggtgaaactggaaatatcttcacatgaaaagtagaccgaagcattctgaggaacctctttgtgatgtctccattcatttgacagagttgaatgcttcttttaattcagaagttcggcaaccatatttttgtagaatctgcaaagggatatttgtgagacatttgaagcctatagtgaaatagtaaatatcttcacataaaaactagacagaagctttctgagcaacttctttgtgatgtgtgcattcatctcacagtgttgaaactttattttatttgagcagtttagagacagtctatttctgcaatctgcaaaggcatatttctgagccatttgaggtctgtggtgaaagagaaatatcttcacatttaaactagacagaagaagtctgagaaaattctttgtgatgtgtgcattcacctcagagaggtgaacttttcttttgatggagcagtttggaaacagtctttttatagtatctgcagaaggatatttgtgagcagtttaaggcctgtggtgaaaaaggaaatatcttcacataaaaactagacagaagatttctgagaaacttttttgtgatgggtgctttcatctcacagagttgaaaatttcttttgattgagcagtttggaaacagtcttttcgtatcatctgcaaagggatgtgtggagcgctttgtggcctaaggtgaaaatggaaatatcttcacataaaatctagacagaagcattctgagaaacttctttgtgatgtgttcattcatctcacaatgttgaacgtttcttttgattgagaggtttgtaaacagaacttttgtagaatctgcaaagggatatttgtgagccccttgattcctatggcaaaataggaattctcttgagataaaaactagacagaagaattcggagaaacttctctttgatgagtgcattcatttcacatagttgaaacatgctatatgggccagtttggaaacagtctttttgtagtgtctgcagacagatatttttgagtggcttaaagactgtggtgaaaaaagaaatatcttcacagagtaaccagacagaagctttctgagaaactactttgtgatgtgtgctttcgtctcacagagttgagcctttctgttgattgaccagtttggaaacattctttctgtagaatccgcaaatggatatttggagcaatttgcggcctacggtgaagaaggaaatatcttcacataaaaactagacagaagcattttgagaaacttctttttgatgtgtgtattcatctcacagagttgaacgtttcttttgatttagcaatttggagaaagtctcttggtagtataagcggagttatgtttgtgagtggtttaaggcctacggtgccaaaggaaataccttcacataaaatgcagacagaaggtttttgagaaaactctttgtgacatttccattcatctctaatagttgaccatttcttctcattgagcagtttggaaacagtcttttcctacaaactgcaaagggacatttctgagccgtttggggccaatggtgaaaaataaatatcttcacatgaaaactagacagaaggtttctgacaaatttctttctgatgtgcacgtttgtcacacggaactgaacctttcttctgattgagcagtttggaatcagtctttttgtagaatctgtgaatgcatatttagagagttttaaggcctagagtgaaaatggaaacgtcttcacataaaaacgacacagtagctttctaagaaacttctttgtgatgtgtccattcacctcacagagttaaacctttcttttgattgaggagtttggaaaatgtcttttcttagaatctacaaagggatatttgtgagccctttatggcctatgttgaaatatgaaatatcttcacataaaaaatagacagaagatttctgagaaacttctttgtgatgtgtgaattcatgtcacagaattcaacctttctttcgattgagcagtttggaaacagtcttttgtagaaggtgcaaagggaaatttcttagctgattcaggcctatggtgaaaaagaaataacttcacataaaaaccagacagaagatttctgagaaacttctttgtgatgtgtgtcttcatctccctgtgttgaacctttcttttgattgagcagtttgggaagtctttgtgtagaatctgcaaatggatatttggagatatttgaggcccttggtgaaaaagcaagtatcttcacataaaaactagacagaatcattccaagaaattgtttgtgatgtgtccattcacgtcacagagttgaacctttcttttgattgagcagtttggaaacactctttttgtagaacctgcaaagggatttttgtgagcgccttatggcctgtggtgaaatacgaaatatcttcacataaaaactagacaggagctttctgagaaactcccttgtgatgtgtgcattcacctcacagagttgaaactttcttttgattgagcagattggaaagaggcttattgtacaatctgcaaagggagaattctgatgcgtttgaggcttatggtgaaagagaaacatattcccataaaaactagacggaagctttctaagaaacttcggtgtgatgtgtgttttcatctcacggaattgaaactttcttttgattgaggagtttggaaacactctttttctagaatctgcaaatggatatttggagagcttctgaggcccatgttgaaaaacgaaacatctacacgtaaaaactaaacagaagcattctgaggaacttctttgtgatgtgtgcattcatcacacatagttgaaactttctttggattgagcagttttgaaacagtccttttgtagaatctgccaagggatatttctgagcccattgagtactatgatgcactgtgaagtatcttcacataaaaactagacagaagttttctgagaaactacttttcgatgtgtccgttaatctaacagagttaaaactttctttttattgagcagtttggacacagtctttttgtagaatctgcaaaacatatttgtgagccctttattgcctatggtgaaataggaatcttcttcacatataaactagacagaagctttctgagaaacttcattgagatgtgtgctttcacctcacagagttaaacactttcttttgattgagctgtttggaaacactctttttgtgaaatctgtaaatggatattaggagtgctttgaggccaatggtgacaaaggaaatatcttctcataaaaactaaacagaagaattctgagaaacttcattctgatgtgcgcattaacctcagagaatttaacctttcttttgattgacaagtatggaaacggtcgtcttttagaatctggaaagggatatttcttagccctttgaggcctacggtgaaactggaaatatcttcacaggaaaagtagaccgaagaattctgaggaacttctttgtgatgtctccattcatctgacagagttgaaggtttcttttaattcagcactttggaaaccatatttttgtagaatctgcaaagggatatttttgagacatttgaagcctatagtgaaatagtaaatatcttcacataaaaactagacaggagctttctgagaaacttctttgtgatgtgtgcattcatctcacagtgttgaaactttattttatttgagcagtttggagacagtctttttctgcaatctgcaaaggcatatttctgagccatttgaggtctgtggtgaaagagaaatatcttcacatttaaactagacagaaggattctgagaaacttctttatgatgtgtgcattcatctcaggtaggtgaaattttcttttgatggagcagtttggaaacagtctttttctagtatctgcagaaggatatttgtgagcggtgtgaggactatgctgaaaaaggaaatatcttcacataaaaactagacagaagatttctgagaaacttttttgtgatgtgtgctctcatctcacagagttgaaaatttcttttgattgagcagtttggaaacagtcctttcgtatcatctgcaaacggatgtttggagcgctttgtggcctaaggtgaaaatggaaacatcttcacataaaaactagacagaagcattctgagaaacttctttgtgatgtgtgcattcatcttacaatgttgaacgtttcttttgattgagcagtttggaaacagaacttttgtagaatctgcaaagggatatttgtgagcccattgattcctatggtgaaataggaattatcttgaaataaaaaaaaggcagaagaattcggagaaacttctctttgatgagtgcattcaattcacatagttgtaacatgctatatgggccagtttggaaacagtctttttgtagtgtctgcagacagatatttttgagtggcttaaagcctgtggtgaaaaaagaaatatcttcacagagtaaccagacagaagctttctgagaaactcctttgtgatgtgtgctttcgtctcacagagttgagcctttctgttgattgaccagtttggaaacattctttctgtagaatccgcaaatggatatttggagcaatttgcggcctactgtgaagaaggaaatatcttcacataaaaactagacagaagcattttgagaaacttctttttgatgtgtgtattcatctcacagagttgaacgtttcttttgatttagcaatttggagaaagtctcttggtagtataagcggagttatgtttgtgagtggtttaaggcctacggtgccaaaggaaataccttcacataaaatgtagacagaagctttttgagaaaactctttgtgacatttccattcatcgctaatagttgaccatttcttttcattgagcagtttggaaacagtcttttcctacaaactgcaaagggatatttctgagccgtttggggccaatggtgaaaaataaatatcttcacatgaaaactagacagaagctttctgagaaactcctctgtgttgtgcacgtttgtatcacagagttgaacctttcatttgattgagcagtttggaaacagtctttttgtagaatctgcaaatgtatatttggagtgttttaaggcctatagtgaaaaaggaaatatcttcacataaaaactacacagtagctttctgagaaacttctttgtgatgtgtccattcattgcacagagtgaaacctttcttttgattgaggagtttggaaaatgtcttttcttagaatctgcaaagggatattcgtgagccctttatggcctttgttgaaatatgaaatatcttcacataaaaagtagacagaagatttctgaaaaacctctttgtgatgtgtgaattcatgtcacagaattcaaccttcctttcagttgagcagtttggaaccagtcttttgtagaagctgcagagggaaatttcttagctgctcgaggcctatggtgaacaagaaatagcctcacataaaaagtagacagaagatttctgagaaacttctttgtgatgtgtgccttcatctcactgtgttgaacctttcttttgattgagcagtttgggaagtctttctgtagaatctgcaaatggatatttggggatatttgaggcccttggtgaaaaaggaagtatcttcacataaaaactagacagaatcattccaagaaattttctgcgatgtgtccattcacgtcacagagttgaacctttcttttgattgagcagtttggaaacagtctttttgtagaacctgcaaagggatatttgtgagccccttatggcctgtggtgaaatacgaaatatcttcacataaaaactagacaggaggtttctgagaaactctcttgtgatgtgtgcattcacctcacagagttgaaactttcttttgattgagcagattggaaagagtcttattgtacaatctgcaaagggagaattctgatccgtttgaggcttatggtgaaagagaaacatattcccataaaaactagacggaagctttctaagaaacttcgttgtgatgtgtgctttcatctcacggaattgaaactttctttgcattgaggagtttggaaacactctttttctagaatctgcaaatggatatttggagagcttctgaggcccatgttgaaaaacgaaacatcttcacgtaaaaactaaacagaagcattctgaggaacttctttgtgatgtgtgcattcatctcacatagttgaaactttctttgtattgagcagttttgaaacagtccttttgtagaatctgccaagggatatttctgagcccattgagtactatgatgcactgtgaagtatcttcacataaaaactagacagaagatttctgagaaactacctttcgatgtgtccattaatctaacagagttaaaactttcttttcattgagcagtttggatacagtctttttgtagaatctgcaaaaaatatttgcgagccctttattgcctatggtgaaataggaatcttcttcacatataaactagacagaagctttctgagaaacttcttggagatgtgtgctttcacctcacagagttaaacactttcttttgattgagctgtttggaaacactctttttgtgaaatctgtaaatggatattagcagggctttgaggccaatggtgacaaaggaaatatcttcacataaaaactaaacagaagaattctgagaaacttcattctgacgtgggcattaacctcagagaatttaacctttcttttgattgagaagtatggaaacggtcgtcttttagaatctggaaagggatatttcttagccctttgaggcctccggtgaaactggaaatatcttcacatgaaaagtagaccgaagcattctgaggaacttctttgtgatgtctccattcatctgacagagttgaaagtttcttttaattcagcactttggaaaccatatttttgtagaatctgcaaagggatatttttgagacatttgaagcctatagtgaaatactaaatatcttcacataaaaactagacaggagctttctgagaaacttctttgtgatgtgcgcattcatctcacagtgttgagactttattttatttgagcagtttagagacagtctttttttgcaatctgcaaaggtatatttctgagccatttgaggtctatggtgaaaaagaaatatcttcacattgaaactagacagaagaattctgagaaacttctttctgatgtgtgcattcacctcagagaggtgaacttttcttttgatggagcagtttggaaacagtctttttatagtatctgcagaaggatatttgtgagcggtttaaggcctatggtggaaaaggaaatatcttcacataaaaactagacagaagatttctgagaaacttttttgtgatgtgtgctttcatctcacagagttgaaaatttcttttgattgagcagtttggaaacagtcttttcatataatctgcaaatggatatttggagcactttgtggcctaagttgaaaatggaaatatcttcacataaaaactagacagaagtattctgagaaacttctttgtgatgtgttcattcatctcacaatgttgaacgtttcttttgattgagaggtttgtaaacacaacttttgtagaatctgcaaagggatatttgtgagccccttgattcctatggcaaaataggaattatcttgagataaaaactagacagaagaatcctgagaaacttctttttgatgagtgcattcatttcacatagttgaaacatgctatatgggccagtttggaaacagtctttttgcagagtctgcagtcaggtattttagagtggcttaaagactatggtgaaaaaggaaacatcttcacatagcaaccagacagaagctgtctgagaaacttctttgtgatgtgtgctttcgtctcacagagttgagcctttctgttgattgaccagtttggaaacattctttctgtagaatccgtaaatggatatttggagcaatttgtggcctacggtgaagaaggaaatatcttcacataaaaactagacagaagcattttgagaaacttatttttgatgtgtgtattcatctcacagagttcaacgtttcttttgatttagcaatttggagaaagtctcttggtagtataagcggagttatgtttgtgagtggtttaaggcctacggtgccaaaggaaataccttcacataaaatgtagacagaagctttttgagaaaactctttgtgacatgtccattcatctctaatagttgaccatttcttctcattgagcagtttggaaacagtcttttcctacaaactgcaaagggatatttctgagccgtttggggccaatggtgaaaaataaatatcttcacatgaaaactagacagaagctttctgacaaatttctttgtgatgtgcacgtttgtcacacggaattgaacatttcttctgattgcgcagtttggaatcagtctttttgtagaatctatgaatgtatatttagagagttttaaggcctagagtgaaaaaggaaacgtcttcacataaaaacgacgcagtagctttctaagaaacttctttgtgatgtgtccattcatctcacagagttaaacctttcttttgattgaggagtttggaaaatgtcttttcttagaatctacaaagggatatttgtgagccctttatggcctatgttgaaatatgaaatatcttcacataaaaactagacagaagatttctgagaaacctctttgtgatgtgtgaattcatgtcacagatttcaaccttcctttcagttgagcagtttggaaccagtcttttgtagaagctgcagagggaaatttcttagctgcttgaggcctatggtgaacaagaaatagcctcacataaaaagtagacagaagatttctgagaaacttctttgtgatgtgtgccttcatctcactgtgttgaacctttcttttgattgagcagtttgggaagtctttctgtagaatctgcaaattgatatttggagatatttgaggcccttggtgaaaaaggaagtatcttcacataaaaactagacagaatcattccaagaaattttttgtgatgtgtccattcacgtcacagagttgaacctttcttttgattgagcagtttggaaacagtctttttgtagaacctgcaaagggatatttgtgagccccttatggcctgtggtgaaatacgaaatatcttcacataaaaactagacaggagctttctgagaaactcccttgtgatgtgtgcattcacctcacagagttgaaactttcttttgattgaacagattggaaagaggcttattgtacaatctgcaaagggagaattctgatccgtttgaggcttctggtgaaagtgaaatatcttcccataaaaactagacggaagctttctaagaaacttcggtgtgatgtgtgctttcatctcacggaattgaaactttcttttgattgaggagtttggaaacactctttttctagaatctgcaaatggatatttggagagctcctgaggcccatgttgaaaaacgaaacatcttcacgtaaaaactaaacagaagcattctgaggaacttctttgtgatgtgtgcattcatctcacatagttgaaactttctttggattgagcagttttgaaacagtcctattgtagaatctgccaagggatatttctgagcccattgagtactatgctgcaatgtgaagtatcttcacataaaaactagacagaagttttctgagaaactacttttcgatgtgtccgttaatctaacagagttaaaactttcttttttttgagcagtttggacacagtctttttgtagaatctgcaaaaaatatttgtgagccctttattgcctatggtgaaataggaatcttcttcacatataaactagacagaagctttctgagaaacttcattgagatgtgtgctttcacctcacagagttaaacactttcttttgattgagctgtttggaaacactctttttgtgaaactgtaaatggatattaggagtgctttgaggccagtggtgaaaaaggaaatatcttctcataaaaactaaagagaagaattctgagaaacttcattctgacgtgggcattaacctcagagaatttaaccattcttttgattgagaagtatggaaacggtcgtcttttagaatctgcaaagggatatttcttagccctttgaggcctacggtgaaactggaaatatcttcacatgaaaagtagaccgaagcattccgaggaacttctttgtgatgtctccattcatctgacagagttgaaggtttcttttaattcagcactgtggaaaccgtatttttgtagaatctgcaaagggatatttttgagacctttgaagcctatagtgaaatagtaaatatcttcacatagaaactagacaggagctttctgagaaacttctttgtgatgtgtgcattcatctcacagtgttgaaactttattttatttgagcagtttagagacagtctttttctgcaatctgcaatggcatatttctgagccatttgaggtctgtggtgaaagagaaatatcttcacatttaaactagacagaagaattctgagaaacttctttgtgatgagtccattcatctcacagagttgaaacattctttgatggaccagtttggaaacagtctttttgtagtatctgcagaaggatatttttgagtggtttaaagactatggtgaaaaagaaaatatcttcacataataactagacagaagatatctgagaaacttttttgtgatgggtgctttcatctcacagagttgtaaatttcttttgattgagcagtttggaaacagtcttttcgtatcatctgcaaagggatgtttggagcgctttgtggcctaaggtgaaaatggaaatatcctcacataaaatctagacagaagcattctgagaaacttctttgtgatgtgttcattcatctcacaatgttgaacgtttcttttgattgagaggtttgtaaacagaacttttgtagaatccgcaaagggatatttgtgagccccttgattcttatggcaaaataggaataatcttgagataaaaactagacagaagaattctaagaaacttctctttgatgagtgcattcctttcacatagttgaaacatgctatatgggccagtttggaaacagtctttttgtagtgtctgcagacagatatttttgagtggcttaaagactgtggtgaaaaaagaaatatcttcacagagtaaccagacagaagctttctgagaaacttctttgtgatgtgtgctttcgtctcacagagttgagcctttctgttgattgaccagtttggaaacattctttttgtagaatccgcaaatggatatctggaacaatttgcggcctacggtgaagaaggaaatatcttcacataaaaactagacagaagcattttgagaaacttctttttgatgtgtgtattcatctcacagagttgaacgtttcttttgatttagcaatttggagaaagtctcttggtagtataagcggagttatgtttgtgagtggtttatggcctacggtgccaaaggaaataccttcacaaaaaatgtagacagaagctttttgagaaaactctttgtgacatttccattcatctctaatagttgaccatttcttctcattgagcagtttggaaacagtcttttcctacaaactgcaaagggatatttctgagccgtttggggccaatggtgaaaaataaatatcttcacatgaaaactagacagaagctttctgacaaatttctttgtgatgtgcacgtttgtcacacggaattgaacctttcttctgattgagcagtttggaatcagtctttttgtagaatctgtgaatgtatatttagagagttttaaggcctagagtgaaaaaggaaacggtcttcacataaaaacgacacagtagctttctgagaaacttctttgtgatgtgtccattcatcgcacagagtggaacctttcttttgattgaggattttggaaaatgtcatttcttagaatctgcaaagggatatttgtgagccctttatggcctttgttgaaatatgaaatatcttcacataaaaagtagacagaagatttctgagaaacctctttgtgatgtgtgaattcatgtcacagaattcaaccttcctttcagttgagcagtttggaaccagtcttttgtagaagctgcagagggaaatttcttagctgcttgaggcctatggtgaacaagaaatagcctcacataaaaagtagacagaagatttctgaaaaacttctttgtgatgtgtgaattcatgtcacagagttgaagctttcttgtgattgagtagtttggaaacactctttttgtagaatctgcaaagggttatttatgagcggtttgaggcctatggtgaaaaagggagtatcagcaaataaaaactagacagaatcattccgagaaattttttgtgatgtgtccattcacgtcacagagttgaacctttcttttgattgagcagtttggaaacagtctttttgtagaacctgcaaagggatatttgtgagccccttatggcctgtggtgaaatacgaagtatcttcacacaaaaactagacaggagctttctgagaaactcccttgtgatgtgtgcattcacctcacagagttgaaactttcttttgattgagcagattggaaagaggcttattgtacaatctgcaaagggagaattctgatccgtttgaggctaatggtgaaagagaaacatcttcccataaaaactagacggaagctttctaagaaacttcggagtgatgtgtgctttcatctcacacaattgaaactttcttttgactgaggagtttggaaacactctttttctagaatctgcaagtggatatttggagagcttttgaggcccatgttgaaaaacgaaacatcttcatgtaaaaactaaacagaagcactctgagaaacttctttgtgatgtgtgcattcatctcacatagttgaaactgtctttggattgagtagtttggaaacagtcctcttgtagaatctgcaaagggatatttctgagcccattgagtactatggtgcaatgtgaaatatcttcacataaaaactagacagaagttttctgagaaattacctttcaatgtgtccattagtcaaacagagttaaaactttgtttttattgagcagtttggatacagtctttttgtagaatctgcaaaaaatatttgcgagccctttattgcctatggtgaaataggaatcttcttcacatataaactagacagaagctttctgagaaactccattgagatgtgtgctttcacctcacagagttaaacactttcttttgattgagctgtttggaaacactctttttgtgaaatctgtaaatggatattaggagtgctttgaggccaatggtggaaaaggaaatatcttctcataaaaactaaacagaagaattctgagaaacttcattctgacgtgggcattaacctcagagaatttaacctttctttggattgagaagtatggaaacggtcgtcttttagaatctggaaagggatatttcttagccctttgaggcctacggtgaaactggaaatatcttcacatgaaaagtagaccgaagcattccgaggaacttctttgtgatgtctctgttcatctgacagagttgaaggtttcttttaattcagcactgtggaaaccgtatttttgtagaatctgcaaagggatatttttgagacctttgaagcctatattgaaatagtaaatatcttcacatagaaactagacaggagctttctgagaaacttctttgtgatgtgtgcattcatctcacagtgttgaaactttattttatttgagcagtttagagacagtctttttctgcaaactgcaaaggcatatttctgagccatttgaggtctgcggtgaaagagaaatatcttcacatttaaactagacagaagaattctgagaaacttctttatgatgtgtgcattcatctcaggtaggtgaaattttcttttgatggagcagtttggaaacagtctttttctagtatctgcagaaggatatttgtgagcggtgtaaggactacgctgaaaaaggaaatatcttcacaaaaaaactagacagaagatttctgagaaacttttttgtgatgggtgctttcatctcacagagttgaaaatttcttttgattgagcagtttggacacagtcttttcgtatcatctgcaaagggatgtttggagcgctttgtggcctaaggtgaaaatggaaatatcttcacataaaatctagacagaagcattctgagaaacttctttgtgatgtgttcattcgtctcacaatgttgaacgtttcttttgattgagaggtttgtaaacagaacttttgtaggatatgcaaagggatatttgtgagccccttgattcctatggcaaaataggaattatcttgagataaaaactagacagaagaattctgaggaacttctctttgatgagtgcattcatttcacatagttgaaacatgctatatgggccagtttggaaacagtctttttgtagtgtctgcagacagatatttttgagtggcttaaagactgtggtgaaaaaagaaatatcttcacagagtaaccagacagaagctttctgagaaacttctttgtgatgtgtgctttcgtctcacagagttgagcctttctgttgattgaccagtttgaaacattctttctgtagaatccgcaaatggatatttggagcaatttgcggcctacggtgaagaaggaaatatcttcacataaaaactagacagaagcattttgagaaacttctttttgatgtgtgtattcatctcacagagttgaacatttcttttgatttagcaatttggagaaagtctcttggtagtataagcggagttatgtttgtgagtggtttaaggcctacggtgccaaaggaaataccttcacataaaatgcagacagaagctttttgagaaaactctttgtgacatttccattcatctctaatagttgaccatttcttttcattgagcagtttggaaacagtcttttcctacaaactgcaaagggatatttctgagccgtttggggccaatggtgaaaaataaatatcttcacatgaaaactagacagaagctttctgacaaatttctttgtgatgtgcacgtttgtcacacggaattgaacctttcttctgattgagcagtttggaatcagtctttttgtagaatctgtgaatgtatatttagagagttttaaggcctagagtgaaaaaggaaacgtcttcacataaaaacgacacagtagctttctgagaaacttctttgtgatgtgtccattcatcgcacagagtgaaacctttcttttgattgaggagcttggaaaatgtcttttcttagaatctgcaaagggatatctgtgagccctttatggcctttgttgaaatatgaaatatcttcacataaaaagtagacagaagatttctgaaaaacctctttgtgatgtgtgaattcatgtcacagaattcaacctttctttcagttgagcagtttggaaccagtcttttgtagaagctgcagagggaaatttcttagctgcttgaggcctatggtgaacaagaaatagcctcacataaaaactagacagaagatttctgagaaacttctttgtgatgtgtgccttcatctcactgtgttgaacctttcttttgtttgagcagtttgggaagtctttctgtagaatctgcaaatggatatttggagatatttgaggcccttggtgaaaaaggaagtatcttcacataaaactagacagaattattccgagaaattttttgtgatgtgtccattcacgtcacagagttgaactttcttttgattgagcagtttggaaacagtctttgtatagaacctgcaaagggatatttgtgagccccttatggcctgtggtgaaatacgaaatatcttcacacaaaaactagacaggagctttctgagaaactcccttgtgatgtgtgcattcacctcacagagttgaaactttcttttgattgagcagattggaaagaggcttattgtacaaactgcaaagggagaattctgatccgtttgaggcttatggtgaaagagaaacatcttcccataaaaactagacggaagctttctaagaaacttcgttgtgatgtgtgctttcatctcacagaattgaaactttcttttgattgaggagtttggaaacactctttttctagaatctgcaaatggatatttggagagcttttgaggcccatgttgaaaaacgaaacatcttcacgtaaaaactaaacagaagaattctgagagacttctttgtaatgtgtgtatttatcttacagtgttaaacctttattttgattgagctttttggaaacactctttttgtagcatctgcaagagtttatttttgagctcattgagacctattttgaaatatgaaatatcttcacataaaaactagatagaagttttctgagaaactacttttcgatgtgtccattaatcaaacagagttaaaactttctttttattgagcagtttggatacagtctatttgtagaatctgcaaaaaatatttgcgagccctttattgcctatggtgaaataggaatcttcttcacatataaaccagacagaagctttctgagaaactccattgagatgtgtgctttcacctcacaggagttaaacactttcttttgattgagctgtttggaaacactctttttgtgaaatctgtaaatggatattaggagtgctttgaggccaatggtggaaaaggaaatatcttctcataaaaactaaacagaagaattctgagaaacttcattctgacgtgggcattaacctcagagaatttaacctttcttttgattgaaaagtatggaaacggtcgtcttttagaatctggaaagggatatttcttagccctttgaggcctacggtgaaactggaaatatcttcacatgaaaagtagaccgaagcattccgaggaacttctttgtgatgtctccattcatctgacagagttgaaggtttcttttaattcagcactgtggaaaccgtatttttgtagaatctgcaaagggatatttttgggacctttgaagcctatagtgaaatagtaaatatcttcacattgaaactagacaggagctttctgagaaacttctttgtgatgtgcgcattcatctaacagtgttgaaactttattttgtttgagcagtttagaaacagtctttttctgcaatctgcaaaggcatatttctgagccatttgaggtctatggtgaaaaaagaaatatcttcacatttaaaatagacagaagaattctgagaaacttctttatgatgtgtgcattcatctcaggtaggcgaaattttcttttgatggagcagtttggaaacagtctttttctagtatctgcagaaggatatttgtgagcggtgtaaggactatggtgaaaaagggaatatcttcacataaaaactagacagaagatttctgagaaacttctttgtgatgtgtgctttcatctcacagagttgaaaatttcttttgattgagcagtttggaaacagtctttttgtataatctgcaaatggatatttggagcactttgtggcctaaggtgaaaatggaaatatcttcacataaaaactagacagaagcattctgagaaacttctttgtgatgtgttcattcatctcacaatgttgaacgtttcttttgattgagaggtttgtaaacagaacttttgtagaatctgcaaagggatatttttgagccccgtgattcctatggcaaaataggaattatcttgagataaaaactagacagaagaattctgagaaacttctctttgatgagtgcattcctttcacatagttgaaacatgctatatgggccagtttggaaacagtctttttgtagtgtctgcagacagatatttttgagtggcttaaagactgtggtgaaaaaagaaatatcttcacagagtaaccagacagaagctttctgagaaacttctttgtgatgtgtgctttcgtctcacagagttgagcctttctgttgattgaccagtttggaaacattctttctgtagaatccgcaaatggatatttggagcaatttgcggcctacggtgaagaaggaaatatcttcagataaaaactagacagaagcattttgagaaacttctttttgatgtgtgtattcatctctcagagttgaacgtttcttttgatttagcaatttggagaaagtctcttggtagtataagcggagttatgtttgtgagtggtttaaggcctacggtgccaaaggaaataccttcacataaaatgcagacagaagctttttgagaaaactctttgtgacatttccattcatctctaatagttgaaaatttcttctcattgagcagtttggaaacagtcttttcctacaaactgcaaagggatatttctgagccgtttggggccaatggtgaaaaataaatatcttcacatgaaaactagacagaagctttctgacaaatttctttgtgatgtgcacgtttgtcacacgaaattgaacctttcttctgattgagcagtttggaatcagtctttttgtagaatctgtgaatgtatatttagagagttttaaggcctagagtgaaaaaggaaacgtcttcacataaaaacgacacagtagctttctgagaaacttctttgtgatgtgtccattcatcgcacagagtgaaacctttcttttgattgaggagtttggaaaatgtcttttcttagaatctgcaaagggatatttgtgagccctttatggcctttgttgaaatatgaaatatcttcacgtaaaaagtagacagaagatttctgagaaatctctttgtgatgtgtgaattcatgtcacagaattcaaccttcctttcagttgagcagtttggaaccagtcttttgtagaagctgcagagggaaatttcttagctgcttgaggcctaaggtgaaccagaaatagcctcacataaaaagtagacagaagatttctgagaaacttctttgtgatgtgtgccttcatctcactgtgttgaacctttcttttgattgagcagtttgggaagtctttctgtagaatctgtaaatggatatttggagatatttgaggcccgtggtgaaaaaggaagtatcttcacataaaaactagacagaatcattccaagaaattgtttgtgatgtgtccattcacgtcacagagttgaacctttcttttgattgagcagtttggcaacagtctttttgtggaacctgcaaagggatatttgtgagccccttatggcctgtggtggaatacgaaatatcttcacataaaaactagacaggagctttctgagaaactcccttttgatgtgtgcattcacctcacagagttgaaactttcttttgattgaggagattggaaagaggcttattgtacaatctgcaaagggagaattctgatccgtttgaggcttctggtgaaagagaaacatcttcccataaaaactagacggaagctttctaagaaacttcgttgtgatgtgtgctttcatctcacggaattgaaactttcttttgattgaggagtttggaaacactctttttctagaatctgcaaatggatatttggagagatcctgaggcccatgttgaaaaacgaaacatcttcacataaaaactaaacagaagcattctgaggaacttctttgtgatgtgtgcattcatctcacatagttgaaactttctttggattgagcagttttgaaacagtccttttgtagaatctgccaagggatatttctgagcccattgagtactatgatgcactgtgaagtatcttcacataaaagctagacagaagatttctgagaaactacctttcgatgtgtccattaatctaacagagttaaaactttctttttattgagcagtttggatacagtctttttgtagaatctgcaaaaaatatttgcgagccctttattgcctatggtgaaataggaatcttcttcacatataaactagacagaagctttcggagaaacttctttgagatgtgtgctttcacctcacagagttaaacactttcttttgattgagctgtttggaaacactctttttgtgaaatctgtaaatggatattaggagtgctttgaggccaatggtgacaaaggaaatatcttcacataaaaactacacagagagaattctgagaaacttcattctgatgtgtgcattcacctcacagaatttaacctttcttttgattgagcagtatggaaatgttcgtcttttagaatttggaaagggatatttcttagccctttgaggcctatggtgaaactggaaatatcttcacatgaaaactagaccaagcattccggggaacttctttgtgatgtctccattcatctgacagagttgaaggtttctttcaattcagcactgtggaaaccatatttttgtagaatctgcaaagggatatttttgggacctttgaagcctatagtgaaagagtaaatatcttcacacagaaactagacaggagctttctgagaaacttctttgtgatgtgcgcattcatctcacagtgttgaaactttattttgtttgagcagtttagaaacagtctttttctgcaatctgcaaaggtatatttctgagccatttgaggtctatggtgaaaaagaaatatcttcacattgaaactagacagaagaattctgagaaacttctttatgatgtgtgcattcctctcaggtaggtgaaattttcttttgatggagcagtttggaaacagtctttttctagtatctgcagaaggatatttgtgagcggtgtaaggactatgctgaaaaaggaaatatcttcacataaaaactagacagaagatttctgagaaacttttttgtgatggttgctttcatctcacagagttgaaaatttcttttgattgagcagtttggaaacagtcttttcgtatcatctgcaaagggatgtgtggagcgctttgtggcctaaggtgaaaatggaaatatcttcacataaaatctagacagaagcattctgagaaacttctttgtgatgtgttcattcgtctcacaatgttgaacgtttcttttgattgagaggtttgtaaacagaacttttgtaggatctgcaaagggatatttgtgagccccttgattcctatggcaaaataggaattatcttgagataaaaactagacaggagaattctgagaaacttctctttgatgagtgcattcatttcacatagttgaaacatgctatatgggccagtttggaaaccgtctttttgtagtgtctgcagacagatatttttgagtggcttaaagactgtggtgaaaaaagaaatatcttcacagagtaaccagagagaagctttctgagaaacttctttgtgatgtgtgctttcgtctcacagagttgagcctttctgttgattgaccagtttggaaacattctttctgtagaatacgcaaatggatatttggagcaatttgcggcctacggtgaagaaggaaatatcttcacataaaaactagacagaagcattttgagaaacttctttttgatgtgtgtattcatctcacagtgttgaacgtttcttttgatttagcaatttggagaaagtctcttggtagtataagcggagttatgtttgtgagtggtttaaggcctacggtgccaaaggaaataccttcacataaaatgcagacagaagctttttgagaaaactctttgtgacatttccattcatctctcatatttgaccatttcttctcattgagcagtttggaaacagtcttttcctacaaactgcaaagggacatttctgagccgtttggggccaatggtgaaaaataaatatcttcacatgaaaactagacagaagctttctgacaaatttctttgtgatgtgcacgtttgtcacacggaattgaacccttcttctgattgagcagtttggaatcagtctttttgtagaatctgtgaatgtgtgtttagagagttttaaggcctagggtgcaagaggcaatgtcttcacataaaaacgatacagtagctttctgagaaacttctttgtgatgtgtccattcatcgcacagagtgaaacctttcttttgattgaggagtttggaaaatgtcttttcttagaatctgcaaagggttatttgtgagccctttacggcctttgttgaaatatgaaatatcttcacgtaaaaagtagacagaagatttctgagaaacctctttgtgatgtgtgaattcatgtcacagaattcaaccttcctttcagttgaacagtttgtaaccagtcttttgtagaagctgcagagggaaatttcttagctgcttgaggcctatggtgaacaagaaatagcctcacataaaaactagacagaaggtttctgagaaacttcttggtgatgtgtgccttcatctcacagtgttgaacctttcttttgatggagcagtttggaaagtctttctgtagaatctgcaaatggatatttggagatatttgaggctcgtggtgaaaaaggaagtatcttcacataaaaactagacaggatcgttccaagaaattttctgcgatgtgtccattcacgtcacagagttgaacctttcttttgattgagcagtttggaaacagtctttttgtagaacctgcaaagggatatttgtgagccccttatggcctgtggtgaaatacgaaatatcttcacataaaaactagacaggagctttcggagaaactcccttgtgatgtgtgcattcaccttacagagttgaaactttcttttggttgagcagattggaaagaggcttattgtacaatctgcaaagggagaattctgatccttttgaggcttctggtgaaagagaaacatcttcccattaaaactagacggaagctttctaagaaacttcggtgtgatgtgtgctttcatctcacagaattgaaactttcttttgattgaggagtttggaaacactctttttctagaatctgcaagtggatatttggagagcttttgaggcccatgttgaaaaacgaaacatcttcacgtaaaaactaaacagaagcattctgaggaacttccttgtgatgtgtgcattcatctcacatagttgaaactttctttggattgagcagttttgaaacagtccttttgtagaatctgccaagggatatttctgagcccattgagtactatgctgcaatgtgaagtatcttcacataaaaactagacagaagttttctgagaaactacctttcgatgtgtccattaatctaacagagttaaaactttctttttattgagcagtttggatacagtctttttgtagaatctgcaaaaaatatttgcgagccctttattgcctatggtgaaataggaatcttcttcacatataaactagacagaagctttcggaaaaacttctttgagatgtgtgctttcacctcacagagttaaacactttcttttgattgagctgtttggaaacactctttttgtgaaatctgtaaatggatattaggagtgctttgaggccaatggtgacaaaggaaatatcttcacataaaaactaaacagaagaattctgagaaacttcattctgacgtgggcattaacctcagagaacttaacctttcttttgattgagaagtatggaaacggtcgtcttttagaatctggaaagggatatttcttagccctttgaggcctacggtgaaactggaaatatcttcacatgaaaagtagaccgaagcattccggggaacttctttgtgatgtctccattcatctgacagagttgaaggtttctttcaattcagcactgtggaaaccatatttttgtagaatctgcaaagggatatttttgggacctttgaagcctatagtgaaatagtaaatatcttcacacagaaactagacaggagctttctgagaaacttctttctgatgtgtgcattcatctcacagtgttgaaactttattttgtttgagaagtttagaaacagtctttttctgcaatctgcaaaggtatatttctgagccatttgaggtctatggtgaaaaagaaatatcttcacatttaaactagacagaagaattctgagaaacttctttatgatgtgtgcattcatctcaggtaggtgaaattttcttttgatggagcagtttggaaacagtctttttctagtatctgcagaaggatatttgtgagcggtgtaaggactatgctgaaaaaggaaatatcttcacataaaaactagacagaagatttctgagaaacttttttgtgatgggtgctttcatctcacagagttgaaagtttcttttgattgagcagtttggaaacagtcttttcgtatcatctgcaaagggatgtttggaacgctttgtggcctaaggtgaaaatggaaatatcttcacataaaatctagacacaagcattctgagaaacttctttgtgatgtgtgcattcatctcacaatgttgaacgtttcttttgattgagcagcttggaaacagaacttttgtagaatctgcaaagggatatttgtgagcacattgattcctatggcaaaataggaattatcttgagataaaagctagacagaaggtttctaagaaatacttttgtgaagtgtgctttcatctcacagaattgaacctttcttttcattgagcagtttgaaaacactatttttgtagaatctgcaagtggatatatggagtgttttcaggcccatggtgaaaaagtaaatatcttcacattaaaaccagacagaagttttctgagaaacttctttgtgatgtgtgctttcgtctcacagagttgagcctttctgttgattgaccagtttggaaacattctttctgtagaatccgcaaatggatatttggagcaatttgcggcctacggtgaagaaggaaatatcttcacataaaaactagacagaagcattttgagaaacttctttttgatgtgtgtattcatctctcagagttgaacgtttcttttgatttagcaatttggagaaagtctcttggtagtataagcggagttatgtttgtgagtggtttaaggcctacggtgctaaaggaaataccttcacataaaatgcagacagaagctttttgagaaaactctttgtgacatgtccattcatctctaattgttgaccatttcttctcattgagcagtttggaaacagtcttttcctacaaactgcaaagggacatttctgagccgtttggggccaatggtgaaaaataaatatcttcacatgaaaactagacagatgctttctgacaaatttctttgtgatgtgcacgtttgtcacaaggaattgaacctttcttctgattgagcagtttggaatcagtctttttgtagaatctgtgaatgtatatttagagagttttaaggcctagagtgaaaaaggaaacgtcttcacataaaaacgacacagtagctttctgagaaatttctttgtgatgtgtccattcatcgcacagagtgaaacatttcttttgattgaggagtttggaaaatgtcttttcttagaatccgcaaagggatatttgtgagccctttatggcctttgttgaaatatgaaatatcttcacataaaaagtagacagaagatttctgagaaacctctttgtgatgtgtgaattcatgtcacagaattcaaccttcctttcagttgagcagtttgtaaccagtcttttgtagaagctgcagagggaaatttcttagctgcttgaggcctatggtgaacaagaaatagcctcacataaacagtagaccgaagatttctgagaaacttctttgtgatgtgtgccttcatctcactgtgttgaacctttcttttgattgagcagtttgggaagtctttctgtagaatctgcaaatggatatttggagatatttgaggcccttggtgaaaaaggaagtatcttcacataaaaactagacagaatgattccgaaaaattttttgtgatgtgtccattcacgtcacagagttgaacctttcttttgattgagcagtttgaaaacagtctttttgtagaacctgcaaagggatatttgtgagccccttatggcctgtggtgaaatacgaaatatcttcacataaaaactagacaggagctttctgagaaactcccttgtgatgtgtgcattcacctcacagagttgaaactttcttttgattgagcagattggaaagaggctcattgtacaatctgcaaagggagaattctgatccgtttgaggcttatggtgaaagagaaacatcttcccataaaaactagacggacgctttctaagaaacttcgttgtgatgtgtgctttcgtctcacagaattgaaactatcctttgattgaggagtttggaaacactctttttctagaatatgcaaatggatatttggagagcttttgaggcccgtggtgaaaaacgaaatatcttcacgtaaaaactaaacagaagcattctgaagaactcctttgtgatgtgtgcattcatctcacatagttgaaactttctttggattgagcagttttgaaacagtccttttgtagaatctgccaggggatatttctgagcccattgagtactatgatgcactgtgaagtatcttcacataaaaactagacagaagttttctgagaaactacttttcgatgtgtccgttaatctaacagagttaaaactttctttttattgagcagtttggacacagtctttttgtagaatctgcaaaacatatttgtgagccctttattgcctatggtgaaataggaatcatcttcacatataaactagacagaagcgttctgagaaacttcattgagatgtgtgctttcacctcacagagttaaacactttcttttgattgagctgtttggaaacactctttttgtgaaatctgtaaatggatattaggagtgctttgaggccaatggtgacaaaggaaataacttctcataaaaactaaacagaagaattctgagaaatttcattctcatgtgtgcattcacctcacagaatttaagctttcttttgattgagcagtatggaagtggttgtcttttagaatctggaaagggatatttcttggccctttgaggcctatggtgaaactggaaatatctttacatgaaaactagaccgaagcgttccgaggaacttctttgtgatgtctccattcatctgacagagttgaaggtttcttttaattcagcactgtggaaaccgtatttttgcagaatctgcaaagggatatttttgagacctttgaagcctacagtgaaatagtaaatatcttcacatagaaactagacaggagctttctgagaaacttctttgtgatgtgtgcattcatctcacagtgttgaaactttattttatttgagcagtttagagacagtctttttctgcaatctgcaaaggcttatttctgagccatttgaggtctgtggtgaaagagaaatatcttcacatttaaactagacagaagaattctgagaaacttctttgtgatgtgtgcattcatctcagagaggtgaacttttcttttgatggagcagtttggaaacagtatttttttagtatctgcagaaggatatttgtgagcagtttaaggcctatggtgaaaaaggaaatatcttcacataaaaactagacagaagatttctgagaaactttcttgtgatgggtgctttcatctcacagagttgaaaatttcttttgattgagcagtttggaaacagtcttttcgtatcatctgcaaagggatgtttggagcgctttgtggtctaaggtgaaaatggaaatatcttcacataaaatctagacagaagcattctgagaaacttctttgtgatgtgttcattcacctcacaatgttgaacgtttcttttgattgagagctttgtaaacagaacttttgtagaatctgcaaagggatatttgtgagccccttgattcctatggcaaaataggaattatcttgagataaaaactagacagaagaattctgagaaacttctctttgatgagtgcattcatttcacatatttgaaacatgctatatgggccagtttggaaacagtctttttgtagtgtctgcagacagatatttttgagtggcttaaagactgtggtgaaaaaagaaatatcttcacagagtaaccagacagaagctttctgagaaacttctttgtgatgtgtgctttcgtctcacagagttgagcctttctgttgattgaccagtttggaaacattctttctgtagaatccgcaaatggatatttggagcaatttgcggcctacggtgaagaaggaaatatcttcacataaaaactagacagaagcattttgagaaacttctttttgatgtgtgtattcatctcacagagttgaacgtttcttttgatttagcaatttggagaaagtctcttggtagtataagcagagttatgtttgtgagtggtttaaggcctacggtgccaaaggaaataccttcacataaaatgtagacagaagaattttgagaaaactccttgtgacatttccattcatctctaatagttgaccatttcttctcattgagcagtttggaaacagtcttttcctacaaactgcaaagggatatttctgagccgtttggggccaatggtgaaaaataaatatcttcacatgaaaactaggcagaagctttctgacaaatttctttgtgatgtgcacgtttgtcacacggaactgaacctttcttctgattgagcagtttggaatcagtctttttgtagaatctgtgaatgtatatttagagagttttaaggcctagagtgaaaaaggaaacgtcttcacataaaaacgacgcagtagctttctgagaaacttctttgtgatgtgtccattcatcgcacagagtgaaacctgtcttttgattgaggagtttggaaaatgtcttttcttagaatctgcaaaggcatatttgtgagccctttatggcctttgttgaaatatgaaatatcttcacataaaaagtagacagaagatttctgagaaatctctttgtgatgtgtgaattcatgtcacagaattcaaccttcctttcagttgagcagtttggaaccagtcttttgtagaagctgcagagggaaatttcttagctgcttgaggcctatggtgaaccagaaatagcctcacataaaaagtagacagaagatttctgagaaacttctttgtgatgtgtgctttcatctcacagtgttgaacctttctttgattgagcagtttggaaagtcttttttgtagaatctgcaaatggatatttggagctatttcaggcccatggtgaaaaagaaagtatcttcacataaaaactagacagaatcattccaagaaattttctgcgatgagtccattcacgtcacagagttgaacctttcttttgattgagcagtttggaaacagtctttttgtggaacctgcaaagggatatttgtgagccccttgtggtctttggtgaaatacgaaatatcttcaaataaaaactagacaggagctttctgagaaactaacttgtgatgtgtgcattcacctcacagagttgaaactttcttttgattgagcagattggaaagaggcttattgtacaatctgcaaagggagaattccgatccgtttgaggcttctggtgaaagagaaacatcttcccataaaaactagacggaagctttctaagaaacttcggtgtgatgtgggctttcatctcacagaattgaaactttcttttgattgaggagtttggaaacactctttttctagaatctgcaagtggatatttggagagcttttgaggcccatgttgaaaaacgaaacatcttcacgtaaaaactaaacagaagcattctgagaaacttctttgtgatgtgtgcattcatctcacagagttgaaactttctttggattgagcagtttggaaacagtccttttgtagaatctgcaaagggatatttctgagcccattgagtactatggtgaaatgtgaaatatcttcacataaaaactagacagaagttttctgagaaactacttttcgatgtgtccattaatctaacagagttgaaactttctttttattgagcagtttggatacagtctttttgtagaatctgcaaaaaatatttgtgagccctttattgcctatggtgaaataggaatcttcttcacatataaactagacagaagctttcggagaaacttctttgagatgtgtgctttcacctcacagagttaaacactttcttttgattgagctgtttggaaacactctttttgtgaaatctgtaaatggatattaggagtgctttgagaccaatggtgacaaaggaaatatcttcacataaaaactacacagaagaattctgagaaacttcattctgacgtgggcattaacctcagagaatttaacctttcttttgattgagaagtatggaaacggccgtcttttaaaatctggaatgggatatttcttagccctttgaggcctacggtgaaactggaaatatcttcacatgaaaagtagaccgaagcgttccgaggaacttctttgtgatgtctccattcatctgacagagttgaaggtttcttttaattcagcactgtggaaaccgtatttttgcagaatctgcaaagggatatttttgagacctttgaagcctacagtgaaatagtaaatatcttcacatagtaactagacaggagctttctgagaaacttctttgtgatgtgtgcattcatctcacagtgttgaaactttattttatttgagcagtttagagacagtctttttctgcaatctgcaaaggcatatttctgagccatttgaagtctgtggtgaaagagaaatatcttcacatttaaactagacagaagaattctgagaaacttctttatgatgggtgcattcatctcaggtaggtgaaattttcttttgatggagcagtttggaaacagtctttttctagtatctgcagaaggatatttgtgagcggtgtaaggactacgctgaaaaaggaaatatcttcacataaaaactagacagaagatttctgagaaacttttttgtgatgggtgctttcatctcacagagttgaaaatttcttttgattgagcagtttggaaacagtcttttcgtatcatctgcaaagggatgtttggagcgctttgtggcctaaggtgaaaatggaaatgtcttcacagaaaatctagacagaagcattctgagaaacttctttgtgatgtgttcattcatctcacaatgttgaacgtttcttttgattgagaggtttgtaaacagaacttttgtagaatctgcaaagggatatttgtgagccccttgattcctatggcaaaataggaattatcttgagataaaaactagacagaagaattcggagaaacttctctttgatgagtgcattcatttcacatagttgaaacatgctatatgggccagtttggaaactgtctttttgtagtgtctgcagacagatatttttgagtggcttaaagactgtggtgaaaaaagaaatatcttcacagagtaaccagacagaagctttctgagaaacttctttgtgatgtgtgctatcgtctcacagagttgagcctttctgttgattgaccagtttggaaacattctttttgtagaatccgcaaatggatatttggaacaatttgcggcctacggtgaagaaggaaatatcttcacataaaaactagacagaaccattttgagaaacttctttttgatgtgtgtattcatctcacagagttgaacgtttcttttgatttagcaatttggagaaagtctcttggtagtataagcggagttatgtttgtgagtggtttaaggcctacggtgccaaaggaaataccttcacaaaaaatgtagacagaagctttttgagaaaactctttgtgacatgtccattcatctctaatagttgaccatttcttctcattgagcagtttggaaacagtcttttcctacaaactgcaaagggacatttctgagccgtttggggccaatggtgaaaaataaatatcttcacatgaaaactagacagaaggtttctgacaaatttctttctgatgtgcacgtttgtcacacggaactgaacctttcttctgattgagcagtttggaatcagtctttttgtagaatctgtgaatgtatatttagagagttttaaggcctagagtgaaaaaggaaacgtcttcacataaaaacgacacagtagctttctgagaaacttcttcgtgatgtgtccattcatctcacagagttaaacctttcttttggttgaggagtttggaaaacgtcttttcttagaatctgcgaagggatatttgtgagtcctttatggcctttgttgaaatatgaaatatcttcacataaaaagtagacagaagatttctgaaaaacctctttgtgatgtgtgaattcatgtcacagaattcaacctttctttcagttgagcagtttggaaacagtcttttgtagaagctgcagagggaaatttcttagctgcttgaggcctatggtgaacaagaaatagcctcacataaaaactagacagaagatttctgagaaacttctttgtgatgtgtgccttcatctcactgtgttgaacctttcttttgattgagcagtttgggaagtctttctgtagaatctgcaaatggatatttggagatatttgaggcccgtggtgaaaaaggaagtatcttcacataaaatctagacagaatcattccgagaaattttttgtgatgtgtccattcacgtcacagagttgaacctttcttttgattgagcagtttggaaacagtctttgtgtagaacctgcaaagggatatttgtgagtcccttatggcctgtggtgaaatacgaaatatcttcacacaaaaactagacaggagctttctgagaaactcccttgtgatgtgtgcattcacctcccagagttgaaactttcttttgattgagcagattggaaagaggcttactgtacaatctgcaaagggagaattctgatccgtttgaggcttctggtgaaagagaaacatcttcccataaaaactacaaggaatctttctaagaaacttcggtgtgatgtgtgctttcatctcacagaattgaaactttcttttgattgaggagtttggaaacactctttttctagaatctgcaagtggatatttggagagcttttgaggcccatgttgaaaaacgaaacatcttcacgtaaaaactaaacagaagcattctgaggaacttctttgtgatgtgtgcattcatctcacatagttgaaactttttttggattgagcagtttggaaacagtcattttgtaaaatctgcaaagggatatttctgaacccattgagtactatggtgcaatgtgaaatatcttcacataaaaactagacaaaagttttctgagaaactacttttcgatgtgtccattaatctaacagagttaaaactttctttttattgagcagttaggatacagtctttttgtagaatctgcaaaaaatatttgtgagccctttattgcctatggtgaaataggaatcttcttcacatataaactagacagaagctttctgagaaacttcattgagatgtgtgctttcacctcacagagttaaacactttcttttgattgagctgtttggaaacactctttttgtgaaatctgtaaatagttattaggagtgatatgaggccaatggtggcaaaggaaatatctttacataaaaactaaacagaagaattctgagaaacttcattctgatgtgtgcattcacctcacagaatttaacctttcttttgattgagcagtatggaaatgttcgtcttttagaatttggaaagggatatttcttagccctttgaggcctatggtgaaactggaaatatcttcacatgaaaactagaccaaagcattccgaggaacttctttgtgatgtctccattcatctgacagagttgaaggtttcttttaattcagcactgtggaaaccgtatttttgtagaatctgcaaagggatatttttgagacctttgaagcctacagtgaaatagtaaatatcttcacatagaaactagacaggagctttctgagaaacttctttgtgatgtgtgcattcatctcacagtgttgaaactttattttatttgagcagtttagagacagtctttttctgcaatctgcaaaggcatatttctgagccatttgaggtctgtggtgaaagagaaatatcttcacatttaaactagacagaagaattctgagcaaacttctttatgatgggtgcattcatctcaggtaggtgaaattttcttttgatggagcagtttggaaacagtctttttctagtatctgcagaaggatatttgtgagcggtgtaaggactacgctgaaaaaggaaatatcttcacataaaaactagacagaagatatctgagaaacttttttgtgatgggtgctttcatctcacagagttgaaaatttcttttgattgagcagtttggaaacagtcttttcgtatcatctgcaaagggatgtttggagcgctttgtggcctaaggtgaaaatggaaatatcctcacataaaatctagacagaagcattctgagaaacttctttgtgatgtgttcattcatctcacaatgttgaacgtttcttttgattgagaggtttgtaaacacaacttttgtagaatctgcaaagggatatttgtgagccccttgattcctatggcaaaataggaattctcttgagataaaaactagacagaagaattctgagaaacttctctttgatgagtgcattcatttcacatagttgaaacatgctatatgggccagtttggaaacagtctttttgtagtgtctgcagacagatatttttgagtggcttaaagactgtggtgaaaaaagaaatatcttcacagagtaaccagacagaagctttctgagaaactttgtgatgtgtgttttcgtctcacagagttgagcctttcttttgattgaccagtttggaaacactctttttgtagaatctgcaaatggatatttggagcaatttgagaactatggtgaaaaaggaaatatcttcacataaaaactagacagaaagcattttgagaaacttctttttgatgtgtgtattcatctcacagagttgaacgtttcttttgatttagcgatttggagaaagtctcttggtagtataagcggagttatgtttgtgagtggtttaaggcctacggtgccaaaggaaataccttcacataaaatgtagacagaagctttatgagaaaactctttgtgacatttccattcatctctaatagttgaccatttcttttcattgagcagtttggaaacagtcttttcctacaaactgcaaagggatatttctgagccgtttggggccaatggtgaaaaataaatatcttcacatgaaaactagacagaagctttctgacaaatttctttgtgatgtgcacgtttgtcacacggaattgaaactttcttctgattgagcagtttggaatccgtctttttgtagaatctgtgaatgtatatttagagagttttaaggcctagagtgaaaaaggaaacgtcttcacataaaaacgacacagtagctttctgagaaacttctttgtgatgtgtccattcatcgcacagagtgaaacctttcttttgattgaggagtttggaaaatgtcttttcttagaatctgcaaagggatatttgtgatccttttatggcctttgttgaaatatgaaatatcttcacgtaaaaagtagacagaagatttctgaaaaacctctttgtgatgtgtgaattcatgtcacagaattcaaccttcctttcagttgagcagtttggaaccagtcttttgtagaagctgcagagggaaatttcttagctgcttgaggcctatggtgaacaagaaatagcctcacataaaaagtagacagaagatttctgagaaacttttttgtgatgtgtgccttcatctcactgtgttgaacctttcttttgtttgagcagtttgggaagtctttctgtagaatctgcaaatggatatttggagatatttgaggcccttggtgaaaaaggaagtatcttcacataaaactagacagaatcattccgagaaattttttgtgatgtgtccattcacgtcacagagttgaacctttcttttgattgagcagtttggaaacagtctttgtgtagaacctgcaaagggatatttgtgagccccttatggcctgtggtgaaatacgaaatatcttcacacaaaaactagacaggagctttctgagaaactcccttgtgatgtgtgcattcacctcacagagttgaaactttcttttgattgagcagattggaaagaggcttattgtacaatctgcaaagggagaattctgatccgtttgaggcttatggtgaaagagaaacatcttcccataaaaactagacggaagctttctaagaaacttcgttgtgatgtgtgctttcatctcacggaattgaaactttcttttgattgaggagtttggaaacactctttttctagaatctgcaaatggatatttggagagatcctgaggcccatgttgaaaaacgaaacatcttcacgtaaaaactaaacagaagcattctgaggaacttctttgtgatgtgtgcattcatctcacatagttgaaactttctttggattgagcagttttgaaacagtccttttgtagaatctgccaagggatatttctgagcccattgagtactatgatgcactgtgaagtatcttcacataaaaactagacagaagttttccgagaaactacttttcgatgtgtccgttaatctaacagagttaaaactttctttttattgagcagtttggacacagtctttttgtagaaactgcaaaaaatatttgtgagccctttattgcctatggtgaaataggaatcttcttcacatataaactagacagaagctttctgagaaactccttggagatgtgtgctttcacctcacagagttaaacactttcttttgattgagctgtttggaaacactctttttgtgaaatctgtaaatggatattaggagtgctttgaggccaatggtgacaaaggaaatatcttcacataaaaactaaacagaagaattctgagaaacttcattctgacgtgggcattaacctcagagaatttaacctttcttttgattgagaagtatggaaacggtcgtcttttagaatctggaaagggatatttcttagccctttgaggcctacggtgaaactggaaatatcttcacatgaaaagtagaccgaagcattccgaggaacttctttgtgatgtctccattcatctgacagagttgaaggtttcttttaattcagcactgtggaaaccgtatttttgtagaatctgtaaagggatatttttgagacctttgaagcctatagtgaaatagtaaatatcttcacatagaaactagacaggagctttctgagaaacttctttgtgatgtgtgcattcatctcacagtgttgaaactttattttatttgagcagtttagagacagtctttttctgcaatctgcaaaggcatatttctgagccatttgaggtctgtggtgaaagagaaatatcttcacatttaaactggacagaagaattctgagaaacttctttatgatgtgtgcattcatctcaggtaggtgaaattttcttttgatggagcagtttggaaacagtctttttctagtatctgcagaaggatatttgtgagcggtgtaaggactatggtgaaaaaggaaatatcttcacataaaaactagacagaagatttctgagaaacttttttgtgatgggtgctttcatctcacagagttgaaaatttcttttgattgagcagtttggaaacagtcttttcgtatcatctgcaaaggcatgtttggagcgctttgtggcctaaggtgaaaatggaaatatcttcacataaaatctagacagaagcattctgagaagcttctttatgatgtgttcattcatctcacaatgttgaacgtttcttttgattgagaggtttgtaaacagaacttttgtagaatctgcaaagggatatttgtgagccccttgattcctatggcaaaataggaattatcttgagataaaaactagacagaagaattctgagaaacttctctttgatgagtgcattcatttcacatagttgaaacatgctatatgggccagtttggaaaccgtctttttgtagtgtctgcagacagatatttttgagtggcttaaagactgtggtgaaaaaagaaatatcttcacagagtaaccagacagaagctttctgagaaacttctttgtgatgtgtgctttcgtctcacagagttgagcctttctgttgattgaccagtttggaaacattctttttgtagaatccgcaaatggatatttggaacaatttgcggcctacggtgaagaaggaaatatcttcacataaaaactagacagaagcattttgagaaacttctttttgatgtgtgtattcatctcacagagttgaacgtttcttttgatttagcaatttggagaaagtctcttggtagtataagcggagttatgtttgtgagtggtttaaggcctaaggtgccaaaggaaataccttcacataaaatgcagacagaagctttttgagaaaactctttgtgacatttccattcatctctaagagttgaccatttcttttcattgagcagtttggaaacagtctttttgtacaaaatgcaaagggatatttctgagcagtttgaggccaatggtgaaaaataaatatcttcacatgaaaactagacagaagctttctgacaaattgctttgtgatgtgcaagtttgtcacacggaattgaacttttcttctgattgagcagtttggaatcagtctttttgtagaatctgtgaatgtatatttagggagttttaaggcctagagtgaaaaaggaaacgtcttcacataaaaacgacacagtagctttctgagaaacttctttgtgatgtgtccattcatcgcacagagtgaaacctttcttttgattgaggagtttggaaaatgtctttccttagaatctgcaaagggatatttgtgagccctttatggcctttgttgaaatatgaaatatcttcacataaaaagtagacagaagatttctgaaaaacctctttgtgatgtgtgaattcatgtcacagaattcaaccttcctttcagttgagcagtttggaaccagtcttttgtggaagctgcagagggaaatttcttagctgcttgaggcctatggtgaacaagaaatagcctcacataaaaagtagacagaagatttctgagaaagttctttgtgatgtgtgccttcatctcactgtgttgaacctttcttttgattgagcagtttgggaagtctttctgtagaatctgcaaatggatatttggagatatttgaggcccttggtgaaaaaggaagtatcttcacataaaaactagacagaatcattccgagaaattttttgtgatgtgtccattcacgtcacagagttgaacctttattttgattgagcagtttgaaaacagtctttttgtagaacctgcaaagggatatttgtgagccccttatggcctgtggtgaaatacgaaatatcttcacataaaaactagacaggagctttctcagaaactcccttgtgatgtgtgcattcacctcacagacttgaaactgtcttttgattgagcagattggaaagaggcttattgtacaatctgcaaagggagaattctgatccgtttgaggcttctggtgaaagagaaacatcttcccataaaaactagacggaagctttctaagaaacttcggtgtgatgtgtgttttcatctcagggaattgaaactttcttttcattgaggagtttggaaacactctttttctagaatctgcaaatggatatttggagagattctgaggcccatgttgaaaaacgaaacatcttcacgtaaaaactaaacagaagcattctgaggaacttctttgtgatgggtgcattcatctcacatagttgaaactttctttggattgagcagttttgaaacagtccttttgtagaatctgccaagggatatttctgagccgattgagtactatgctgcaatgtgaagtatcttcacataaaaactagacagaagttttctgagaaactacttttcgatgtgtccgttaatctaacagagttaaaactttctttttattgagcagtttggacacagtctttttgtagaatctgcaaaaaatatttgtgagccctttattgcctatggtgaaataggaatcttcttcacatataaactagacagaagctttctgagaaacttcttggagatgtgtgctttcacctcacagagttaaacactttcttttgattgagctgtttggaaacactctttttgtgaaatctgtaaatggatattaggagtgctttgaggccaatggtgacaaaggaaatatcttcacataaaaactaaacagaagaattctgagaaacttcattctgacgtgggcattaacctcagagaatttaacctttctttggattgagaagtatggaaacggtcgtcttttagaatcgggaaagggatatttcttagccctttgaggcctacggtgaaactggaaatatcttcacatgaaaagtagaccgaagcattccgaggaacttctttgtgatgtctccattcatctgacagagttgaaggtttcttttaattcagcactgtggaaaccgtatttttgcagaatctgcaaagggatatttttgagacctttgaagcctacagtgaaatagtaaatatcttcacatagaaactagacaggagctttctgagaaacttctttgtgatgtgtgcattcatctcacagtgttgaaactttattttatttgagcagcttagagacagtctttttctgcaatctgcaaaggcatatttctgagccatttgaggtctgtggtgaaagagaaatatcttcacatttaaactagacagaagaattctgagaaacttctttatgacgtgtgcattcatctcaggtaggtgaaattttcttttgatggagcagtttggaaacagtctttttctagtatctgcagaaggatatttgtgagcggtgtaaggactatgctgaaaaagcaaatatcttcacataaaaactagacagaagatttctgagaaacttttttgtgatgggtgctttcatctcacagagttgaaagtttcttttgattgagcagtttggaaacagtcttttcgtatcatctgcaaagggatgtttggagcgctttgtggcctaaggtgaaaatggaaatatcttcacataaaatctagacagaagcattctgagaaactttctttgtgatgtgttcattcatctcacaatgttgaacgtttcttttgattgagaggtttgtaaacagaacttttgtagaatctgcaaagggatatttgtgagccccttgattcctatggcaaaataggaattatcttgagataaaaactagacagaagaattctgagaaacttctctttgatgagtgcattcatttcacatagttgaaaaatgctatatgggccagtttggaaacagtctttttgtagtgtctgcagacagatatttttgagtggcttaaagactgtggtgaaaaaagaaatatcttcacagagtaaccagacagaggctttccgagaaacttctttgtgatgtgtgctttcgtctcacagagttgcgcctttctgttgattgaccagtttgggaacattctttttgtagaatctgcaaatggatatttggagcaatttgtggcctatggtgaaaaaggaaatatcttcacataaaaactagacaggagcattttgagaaacttctttttgatgtgtgtattcatctcacagagttgaacctttcttttcatttagcaatttggagaaagtctcttggtagtataagtggagttatatttgcgagcggtttaaggcctatggtgccaaaggaaataccttgacataaaatgcagacagaagctgtttgagaaaactctttgtgacatttccattcatctctaatagttggccatttcctttcattgagcagtttggaagcagtctttttctacaaactgcaaagggatatttctgagcggtttggggccaacggtgaaaaataaatatcttcccatgaaaactagacagaagctttctgacaaatttcttagtgatgtgcacgtttgtcacacggaattgaacccttcttctgattgagcagtttggaatcagtctttttgtagaatctgtgaatgtgtatttagagagttttaaggcctagggtgcaagaggcaatgtcttcacataaaaacgacacagtagctttctgagaaacttctttgtgatgtgtccattcatcgcacagagtggaacctttcttttgattgaggagtttgtaaaatgtcttttcttagaatctgcaaagggatatttgtgagccctttatggcctttgttgaaatatgaaatatcttcacataaaaagtagacagaagatttctgagaaacttctttgtgatgtgtgaattcatgtcacagaattcaacctttcttttgattcagcagttggagacagtcttttgtagaagctgcaaagggaaatttcttagacctttgaggcctatggtgaaaaagaaatatcttcacataaaaactagacagaagatttctgagaaacttctttgtgatgtgtgccttcatctcactgtgttgaacctttcttttgattgagcagtttgggaagtctttctgtagaatctgcaaatggatatttggagatatttgaggtccttggtgaaaaaggaagtatcttcacataaaaactagacagaatcattccgagaaattttttgtgatgtgtccattcacgtcacagagttgaacctttcttttgattgagcagtttggaaactgtctttttgtagaacctgcaaagggatatttgtgagccccttatggcctgtggtgaaatacgaagtatcttcacacaaaaactagacaggagctttctgagaaacttccttgtgatgtgtgcattcacctcacagagttgaacctttcttttgattgagcaggttggaaagaggcttattgtacaatccgcaaagggataattctgatccatttgaggcctatggtgaaagagaaatatcttcacataaaaactagacagaagctttctaagaaacttcggtgtgatgtgtgctttcatctcacagaattgaaactttcttttgattgaggagtttggaaacactctttttctataatctgcaaatggatatttggagagattttgaggcccatgtggaaaaacgaaacatcttcgcgtaaaaactaaacagaaacattctgaggaacttctttgtgatgtgtgcattcatctcacatagttgaaactttctttggattgagcagttttgaaacagtccttttgtagaatctgccaagggatacttctgagcccattgagtactatgatgcactgtgaagtatcttcacataaaaactagacagaagttttctgagaaactccttttcgatgtgtccgttaatctaacagagttaaaactttctttttattgagcagtttggatacagtctttttgtagaatctgcaaaacatatttgcgagccctttattgcctatggtgaaataggaatcttcttcacatataaactagacagaagctttctgagaaacttcattgagatgtgtgctttcacctcacagagttaaacactttcttttgattgagctgtttggaaacactctttttgtgaaatctgtaaatagttattaagactgatatgaggccaatggtggcaaaggaaatatctttacataaaaactaaacagaagaattctgagaaacttcattctgacgtgggcattaacctcagagaatttaacctttctttggattcagaagtatggaaacggtcgtcttttagaatctggaaagggatatttcttagccctttgaggcctacggtgaaactggaaatatcttcacatgaaaagtagaccgaagcattccgaggaacttctttgtgatgtctccattcatctgacagagttgaaggtttcttttaattcagcactgtggaaaccatatttttgtagaatctgcaaagggatatttttgagacctttgaagcctatagtgaaatagtaaatatcttcacatagaaactagacaggagctttctgagaaacttctttgtgatgtgtgcattcatctcacagtgttgaaactttattttatttgagcagtttagagacagtctctttctgcaatctgcaaaggtatatttctgagccatttgaggtctgtggtgaaaaaggattatcttcacatttaaactagacagaagaattctgagaaacttctttgtgatgtgtgcattcatctcaggtaggtgaaattttcttttgatggagcagtttggaaacagtctttttctagtatctgcagaaggatatttgtgagcggtgtaaggactacgctgaaaaaggaaatatctacacataaaaactagagagaagatttctgagaaacttttttgtgatgggtgctttcatctcacagagttgaaaatttcttttgattgagcagtttggaaacagtcttttcgtatcatctgcaaagggatgtttggagcgctttgtggcctaaggtgaaaatggaaatatcttcacataaaatctagacagaagcattctgagaaacttctttgtgatgtgttcattcatctcacaatgttgaacgtttcttttgattgagaggtttgtaaacagaacttttgtagaatctgcaaagggatatttgtgagccccttgattcctatggcaaaataggaattatcttgtcataaaaactagacaggagaattctgagaaacttctttgtgatgagtgcattcaactcacatagttgaaacattctatatggaccagtttggaaacagtctttttgtagtacctgcagagggatatttttgagtggtttaaagactatggtgaaaaaggaaatatcttcacataataaccagacagaagctttctgagaaacttctttgtgatgtgtgctttcgtctcacagagttgagcctttcttttgattgaccagtttggaaacattctttctgtagaatccgcaaatggatatttggagcaatttgcggcctacggtgaagaaggaaatatcttcacataaaaactagacagaagcattttgagaaacttctttttgatgtgtgtattcatctcccagagttgaacgtttcttttgatttagcaatttggagaaagtctcttggtagtataagcggagttatgtttgtgagtggtttaaggcctacggtgccaaaggaaataccttcacataaaatgcagacagaagctttttgagaaaactctttgtgacatgtccattcatctctaatagttgaccatttcttctcattgagcagtttggaaacagtcttttcctacaaactgcaaagggacatttctgagccgtttggggccaatggtgaaaaataaatatcttcacatgaaaactagacaaaagctttctgacaaattgctttgtgatgtgcaagtttgtcacacggaattgaacttttcttctgattgagcagtttggaatcagtctttttgtagaatctgtgaatgtatatttagagagttttaaggcctagagtgaaaaaggaaacgtcttcacataaaaacgacacagtagctttctgagaaacttctttgtgatgtgtccattcatcgcacagagtgaaacctttcttttgattgaggagtttggaaaatgtcttttcttagaatctgcaaagggatatttgtgagccctttatggcctttgttgaaatatgaaatgtcttcacgtaaaaagtagacagaagatttctgaaaaacctctttgtgatgtgtgaattcatgtcacagaattcaaccttcctttcagttgagcagtttggaaccagtcttttgtagaagctgcagagggaaatttcttagctgcttgaggcctatggtgaacaagaaatagcctcacatgtaaagtagacagannnnnnnnnnnnnnnnnnnnnnnnnnnnnnnnnnnnnnnnnnnnnnnnnnnnnnnnnnnnnnnnnnnnnnnnnnnnnnnnnnnnnnnnnnnnnnnnnnnntgcattctcagaaagttctttgtgatgtgtgcattcaaatcacagatttgaacataccttgtcatagagcagttttgaaacactcgtttcgtagaatctgcaactgggtatttggacttctttgaggccttcgtcggaaacgggaatatcttcacataagaactagacagaagaattctggggaatttctttgtgatgtgtgcattcaactcacagagttgaacctttctgttgatagagcagtttggaaacactcttttcgcaaaatctgcagagtggatatttgtactgcttagaggccttcgttggaaacgggaatatctccacataaaaactagacagaagcattctcagaaacttctttgtgatctgcacattcaacacaaagagtagaatcttccttttgatagagcagtttttaaacactctttttgtagaatctgcaagtggacatttggaaagctttgaggcctgtggtggaaaaggaaataccttcacataaaaaccagacggaagcattctcagaaacttctttgtattgtttgcattcaacccactgagttgaacacaccttttcacagagcagttttgaaacactctttttgtagaatctgcaagtggatatatggagtgctttgaggccttctttgtaaacgggaatatcttcacataaaaactagagagaagcattctcagagccttctttgtgatgtgtgcattcaactcacagagctgaacctttcttttgatagaggtgtttgaagcactgtttttttagaatctgcaagtggatatattgagtgctttgaggccttctttgtaaacgggaatatcttcacataaaaactagagagaagcattctcagagccttctttgtgatgtgtgcattcaactcacagagctgaacctttcttttcatagagctgtttggaagcactgtttttttagaatccgcatgtggaaattttcagagcttcgaggcctgtggtggagaaggaaatatcttcacataaaaactagacagaagcattctcagaaacttgtttgtgacgtttgcattcaactcacagagttgaacataccttttcatagagcagttttgaaacactcttttcgtaggatctgcaagtggatatttggactgctttgaggccttcgttggaaagaggaatatcttcacataaaaactagacggaagcattctcagaaacttctttgtgatgtgtgaattcaactcacagagttgaagcttcctattgatagagcagttttgaaaaaccgtttttgtagaatctgccagtggatatttggagagctttgaggcctacggtggaaaaggaaatatcttcacataaaaaccagacacaaagattctcagaaacttctttgtgacgcttgcactcaactcacagagttgaacacaccttttcatagagcagttttgaagcactcttttcgtagaatctgcaagtgtatatttggaatgctttgaggccttcattgtaaacgagaatatcttcacataaaaacgagacagaagaattctcagcaactactttgtgatgattgcattcaactcactgtgttaatctttattttgatagggcagttttgaaacactgtttttgtagcatctgcaagtggtcatttggagagctttgaggcctatggtggaaaaggaaatatcttcacataaaaacaggacagaagcattttcagaatctccgctgtgatgtttgcattgaactcacagagttgaacgtcccttttcatagagcagttttgaaacactcttcgtagaatctgccagtggatatttggactgatttgaggcctttgttggacacgggaatatcttcatataaaaactagaaagaagaattctcagaaacttctttgtgatgtgtgcattcaactcagagagttgaacttttcttttgatagagcagttttgaaacagactttttgcagaatctgcaagtggacatttgggaagctttgaggcctatggtggaaaatgatataccttcacataaaaaccagacagatgcattttcagaaacttctttgcgatgtttgcattcaactcacagtgttaacctttattttcatagaacagttttgaaacactgtttttgtagcatctgcaagtggtcatttggagagctttgaggcctattgtggaaaaggaaatatctccacataaaaactggacagaagcattctcagaatctcctctgtgatgtttgcattcaactcacagagttgaacataccttttcatagagcagttttgaaacactcttttcgtagaatccacaagtggttatttggactgatttgaggcctttgttggaaacgggaataccttcacataaaatctagaaagaagaattctcagaaacttctttgtgatatgtgcattcaactcagagagttgaacttttcttttcatagagcagttttgaaacagactttttgtagaatctgcaagtggacatttgggaagctttgaggcctatggtggaaaatgatataccttcacataaaaagaagacagaagcattttcagaaacttctttgtgatgtttgcattcaactcacagagatgaaataccttttcatagcgcagttttgaaaaaatcttttcgtagtatctgcaaggggatatttggactgctttgaggccttcagtggaaacagaaatatcttaacataaaaattagacagaagcattctcagaaacttctttgtgatgaggccattcaactcacagagctgaaccactcttttgaaggagcagtttgaaacattctttttgtagaatctgcaagtggacatttggagagctttgaggcctacagtggaaaaagaaatatcttcacataaaaactggacagaagcattctcaaaaacatctttgtgatatttgcattcaactcacagatttgaaaataacttttcgtagagcagttttgaaacactctttttgtagaatctgcaagaggatatttggactgctttaaggacctcgttggaaacgggaatatcttcacataaaaactagacagaagcattctcagaaacacctttgtgatgtgggcattcaactcagagagttgaacctttcttttgatagagcagttttgaaacactgtttttatagaatctgcaagtggacatttggagacttttgaagcatatggtggaaatggaaataccttcccatgaaaactagacagaaacattctcagtacctactttgttatgtttgcattcaactcacagagatggacataccttttcatagagcagttttggaaaactcttttggtagaatatgcaaatggataattggaacgctttcaggccttcgttggaaatgtgaatatcttcaaataaaaactagacaaaagcattctcagaaacttctttgtgatgtgggcattcaactcacaggcttgaacctttcctttcatagagcagtcttgaaacactctttttgaagaatcagcaagtggacatttggagagctttgaggcctatggtgagaaagaaaatatcttcacataaaaaccagacagaagcattctgagaaacttctttgtgctgtttgcattcaactcacaaagttgaaaataccttttcatagaggagttttgaaacactcttttcgtacaatctgcaagtggatatttggactgcttttaggttttctttggaaacaggaatatctttacataaaaactagacagatgcattctcagaaagttgttggtgatgtgtgcattcaactcacagatatgaacataccttgtcatagagcagttttgaaacactcgtttcgtagaatctgcaagtggatatttggactgctttgaggccttcgtcggaaacgggaatatcttcacataagaactagacagaagaattctgggaaatttctttgtgatgtgtgcattcaactcacagagttgaacctttctgttgatagagcagtttggaaacactcttttcgcaaaatctgcaaagtggatatttgtactgcttagaggccttcgttggaaacgggaatatctccacataaaaactagacagaagcattctcagaaacttctttgtgatctgcacattcaacacaaagagttgagtcttccttttgatagagcagtttttaaacactctttttgtagaatctgcaagtggacatttggaaagctttgaggcctgtggtggaaaaggaaataccttcacataaaaaccagatggaagcattctcagaaacttctttgtattgtttgcattcaacccacagagttgaacataccttttcacagagcagttttgaaacactctttttgtagaatctgcaagtggatatacggagtggtttgaggccttctttgtaaacgggaatatcttcacataaaaactagagagaagcattctcagagccttctttgtgatgtgtgcattcaactcacagagctgaacctttcttttgatagagctgttttgaagcactgtttttttagaatctgcaggtggatatatggagtgctttgaggccttctttgtaaacgggaatatcttcacataaaaactagagagaagcattctcagagccttctttgtgatgtgtgcattcaactcacagagctgaacctttcttttgatagagctgttttgaagcactgtttttatagaatctgcatgtggaaattttcagagcttcgaggcctgtggtggagaaggaaatatcttcacataaaaactagacagaagcattctcagaaacttgtttgtgacgtttgcattcaactcacagagttgaacataccttttcatagagcaattttgaaacactcttttcgtaggatctgcaaatggatatttggactgctttgaggccttcgttggaaagaggaatatcttcacataaaaactagacggaagcattctcagaaacttctttgtgatgtgtgaattcaactcacagagttgaagctttctattgatagagcagttttgaaaaaccgttttttgtagaatctgccagtggacatttggagagcttggaggcctacggtggaaaaggaaatatcttcacataaaaaccagacacaaagattctcagaaacttctttgtgacgcttgcactcaactcacagagttgaacacaccttttcatagagcagttttgaagcagtcttttcgtagaatctgcaagtgtatatttggaatgctttgaggccttcattgtaaacgagaatatcttcacataaaaacgagacagaagcattctcagcaactactttgtgatgattgcattcaactcactgtgttaacctttattttgatagggcagttttgaaacactgtttttgtagcatctgcaagtggtcatttggagagctttgaggcctatggtggaaaaggaaatatcttcacataaaaacaggacagaagcattttcagaatctccgctctgatgtttgcatggaactcacacagttgaacgtcccttttcatagagcagttttgaaacactcttcgtagaatctgccagtggatatttggactgatttgaggcctttgttggacacgggagtatcttcatataaaaactagaaagaagaattctcagaaacttctttgtgatgtgtgcattcaactcagagagttgaacttttcttttgatagagcagttttgaaacagactttttgcagaatctgcaagtggacatttgggaagctttgaggcctatggtggaaaatgatataccttcacatagaaaccagacagaagcattttcagaaacttctttgcgatgtttgcattcaactcacagtgttaacctttattttcatagaacatttttgaaacactctttttgtagcatctgcaagtggtcatttggagagctttgaggcctatggtggaaaaggaaatatctccacataaaaactggacagaagcattctcagaatctcctctgtgatgtttgcattcaactcacagagttgaacataccttttcatagagcagttttgatacactcctttcgtagaatccacaagtggatatttggactgatttgaggcctttgttggaaacgggaataccttcacataaaatctagaaagaagaattctcagaaacttctttgtgatatgtgcattcaactcagagagttgaacttttgttttgatagagcagttttgaaacagacatttgtagaatctgcaagtggacatttgggaagctttgaggcctatggtggaaaatgatataccttcacataaaaagaagacagaagcattttcagaaacttctttgtgatgtttgcattcaactcacagagatgaaataccttttcatagcgcagttttgaaaaactcttttcgtagtatctgcaaggggatatttggactgctttgaggccttcagtggaaacagaaatatcttaacataaaaattagacagaagcattctcacaaacttctttgtgatgaggccattcaactcaaagagctgaaccactcttttgaaggagcagtttgaaacattgtttttgtagaatctgcaagtgcaaagccaagagagctttgaggcctacagtggaaaaggaaatatcttcacataaaaactggacagaagcattctcaaaaacatctttgtgatatttgcattcaactcacagagttgaaaataacttttcgtagagcagttttgaaacactctttttgtagaatctgcaagaggatatttggactgctttaaggacctcgttggaaacgggaatatcttcacataaaaagtagacagaagcattctcagaaacaccttttttgatgtgggcattcaactcagagatttgaacctttcttttgatagagcagttttgaagcacttactttgtacaatctgcaagtggacatttggagagctttgaggcctacggtggaaaaggaaatagcctcacataaaaactagatagaaacattctcattacctactttgttatgtttgcattcaactcacagagatggacataccttttcatagagcagttttggaaaactctttcggtggaatatgcaaatggataattggaacgctttcaggccttcgttggaaatgtgaatatcttcaaataaaaactagacaaaagcattctcagaaacttctttgtgatgtgggcattcaactcacagacttgaacctttcttttcatagagcagtcttgaaacactctttttgaagaatcggcaagtggacatttggagagctttgaggcctatggtgagaaagaaaatatcttcacataaaaaccagacagaagcattctgagaaacttttttgtgctgtttgcattcaactcacaaagttgaaaataccttttcatagaggagttttgaaacactcttttcgtagaatctgcaagtggatatttggactgcttttaggttttctttggaaacaggaatatctttacataaaaactagacagatgcattctcagaaagttctttgtgatgtgtgcattcaactcacagatttgaacataccttgtcatagagcagttttgaaacactcgtttcgtagaatctgcaagtggatatttggactgctttgaggccttcgtcggaaacgggaatatcttcacataagaactagacagaagaattctgggaaatttctttgtgatgtgtgcatccaactcacagagttgaacctttctgttgatagagcagtttggaaacactcttttggcaaaatctgcagagtggatatttgtactgcttagaggccttcgttggaaacgggaatgtctccacataaaaactagacagaagcattctcagaaacttctttgtgatctgcacattcaacacaaagagttgaatcttccttttgagagagcagtttttaaacactctttttgtagaatctgcaagtggacatttggaaagctttgaggcctgtggtggaaaaggaaataccttcacataaaaaccagatggaagcattctcagaaacttctttgtattgtttgcattcaacccacagagttgaacataccttttcacagagcagttttgaaacactccttttgtagaatctgtaagttgatatatggagtgctttgaggccttctttgtaaacgggaatatcttcacataaaaactagagagaagcattctcagagccttctttgtgatgtgtgcattcaactcacagagctgaacctttcttttgatagagctgttttgaagcactgtttttttagaatctgcaagtggatatattgagtgctttgaggccttctttgtaaacgggaatatcttcacataaaaactagagagaagcattctcagagccttctttgtgatgtgtgcattcagctcacggagctgaacctttcttttgatagagctgttttgaagcactgtttttttagaatctgcatgtggaaattttcagagcttcgaggcctgtggtggagaaggaaatatcttcacataaaaactagacagaagcattctcagaaacttgtttgtgacgtttgcattcaactcacagagttgaacataccttttcatagagcagttttgaaacactcttttcgtaggatctgcaaatggatatttggactgctttgaggccttcgttggaaagaggaatatcttcacataaaaactagaaggaagcattctcagaaacttctttgtgatgtgtgaattcaactcacagagttgaagctttctattgatagagcagttttgaaaaaccgtttttgtagaatctgccagtggatatttggagagctttgaggcctacggtggaaaaggaaatatcttcacataaaaaccagacacaaagattctcagaaacttctttgtgacgtttgcattcaactcacagagttgaacacaccttttcatagagcagttttgaagcagtcttttcgtagaatctgcaagtgtatatttggaatgctttgaggccttcattgtaaacgagaatatcttcacataaaaacgagacagaagcattctcagcaactactttgtgatgattgcattcaactcactgtgttaacctttattttgatagggcagtttggaaacactgtttttgtagcatctgcaagtggtcatttggagagctttgaggcctatggtggaaaaggaaatatcttcacataaaaacaggacagaagcattttcagaatctccgctgtgatgtttgcattcaactcacagagttgaacgtcccttttcatagggcagttttgaaacactcttcgtagaatctgccagtggatatttggactgattggaggcctttgttggacacgggaatatcttcatataaaaactagaaagaagaattctcagaaacttctttgtgatgtgtgcattcaactcagcagcagttgaacttttcttttgatagagcagttttgaaacagactttttgcggaatctgcaagtggacatttgggaagctttgaagcctatggtggaaaatgatataccttcacataaaaaccagacagatgcattttcagaaacttctttgcgatgtttgcattcaactcatagtgttaacctttattttcatagaacagttttgaaacactgtttttgtagcatctgcaagtggtcatttggagagctttgaggcctatggtggaaaaggaaatatctccacataaaaactggacagaagcattctcagaatctcctctgtgatgtttgcattcaactcacagagttgaacataccttttcatagagcagttttgaaacactcttttcgtagaatccacaagtggatatttggactgatttgaggcctttgttggaaacgggaataccttcacataaaatctagaaagaagaattctcagaaacttctttgtgatgtgtgcattcaactcagagagttgaacttttcttttgatagagcagttttgaaacagactttttgcagaatctgcaagtggacatttgggaagctttgaggcctatggtggaaaatgatataccttcacataaaaagaagacagaagcattttcagaaacttctttgtgatgtttgcattcaagtcacagagatgaaataccttttcatagcgcagttttgaaaacctcttttcgtagtatctgcaaggggatatttggactgctttgaggccttcagtggaaacagaaatatcttaacataaaaattagacagaagcattctcagaaacttctttgtgatgaggccattcaactcacagagctgaaccagtcttttgaaggagcagtttgaaacattctttttgtagaatctgcaagtgcaaagccaagagagctttgaggcctacagtggagaaggaaatatcttcacataaaaactggacagaagcattctcaaaaacatctttgtgatatttgcattcaactcacagagttgaaaataacttttcatagagcagttttgaaacactctttttgtagaatctgcaagaggatatttggactgctttaaggacctcgttggaaacgggaatatcttcacataaaaactagacagaagcattctcagaaacacctttgtgatgtgggcattcaactcagagagttgaacctttcttttgatagagctgttttgaaacactgtttttatagaatctgcaagtggacatttggagacttttgaagcatatggtggaaatggaaataccttcccatgaaaactagacagaaacattctcagtacctactttgttatgtttgcattcaactcacagagatggacataccttttcatagagcagttttggaaaactcttttggtggaatatgcaaatggataattggaacgctttcaggccttcgttggaaatgtgaatatcttcaaataaaaactagacaaaagcattctcagaaacttctttgtgatgtgggcattcaactcacagacttgaacctttcttttcatagagcagtcttgaaacactctttttgaagaatcggcaagtggacatttggagagctttgaggcctatggtgagaaagaaaatatcttcacataaaagccagacagaagcattctgagaaacttctttgtgctgtttgcattcaactcacaaagttgaaaataccttttcatagaggagttttgaaacactcttttcatagaatctgcaagtggatatttggactgcttttaggttttctttggaaacaggaatatctttacataaacactagacagatgcattctcagaaagttctttgtgatgtgtgcattcaactcacagatttgaacatatcttgtcatagagcagttttgaaacactcgtttcgtagaatctgcaagtggatatttggactgctttgaggccttcgtcggaaacgggaatatcttcacataagaactagacagaagaattctgggaaatttctttgtgatgtgtgcatgcaactcacagagttgaaactttctgttgatagagcagtttggaaacactcttttcgcaaaatctgcaaagtggatatttgtattgcttagaggccttcgttggaaacgggaatatctccacataaaaactagacagaagcattctcagaaacttctttgtattgtttgcattcaacccacagagttgaacataccttttcacagagcagtttttaaacactctttttgtagaatctgcaagtggacatttggaaagctttgaggcctgtggtggaaaaggaaataccttcacataaaaaccagatggaagcattctcagaaacttctttgtattgtttgcattcaacccacagagttgaacataccttttcacagagcagttttgaaacactctttttgtagaatctgcaagtggatatatggagtgctttgaggccttctttgtaaacgggaatatcttcacataaaaactagagagaagcattctcagagccttctttgtgatgtgtgcattcaactcacagagctgaacctttcttttgatagagctgttttgaagcactgtttttttagaatctgcaagtgaatatattgagtgctttgaggccttctttgtaaacgggaatatcttcacataaaaactagagagaagcattctcagagccttctttgtgatgtgtgcattcaactcacagagctgaacctttcttttgatagagctgttttgaagcactgtttttttagaatctgcatgtggaaattttcagagcttcgaggcctgtggtggagaaggaaatatcttcacatagaaactagacagaagcattctcagaaacttgtttgtgacgtttgcattcaactcacagagttgaacataccttttcatagagcagttttgaaacactcttttcgtaggatctgcaaatggatatttggactgctttgaggccttcgttggaaagaggaatatcttcacataaaaactagacggaagcattctcagaaacttgtttgtgatgtgtgaattcaactcacagagttgaagctttctattgatagagcagttttgaaaaaccgtttttgtagaatctgccagtggacatttggagagcttggaggcctacggtggaaaaggaaatatcttcacataaaaaccagacacaaagattctcagaaacttctttgtgacgtttgcattcaactcacagagttgaacacaccttttcatagagcagttttgaagcactcttttcgtagaatctgcaagtgtatatttggaatgctttgaggccttcattgtaaacgacaatatcttcacatgaaaacgagacagaagcattctcagcaactactttgtgatgattgcattcaactcactgtgttaacctttattttgatagggcagtttgtaaacactgttttggtagcatctgcaagtgttcatttggagagctttgaggcctatggtggaaaatgatataccttcacatataaaccagacagaaacattttcagaatctccgctgtgatgtttgcattgaactcacagagttgaacgtcccctttcatagagcagttttgaaacacttttcgtagaatctgccagtggatatttggactgattggaggcctttgttggacacgggaatatcttcatataaaaactagaaagaagaattctcagaaacttctttgtgatgtgtgcattcaactcagagagttgaacttttcttttgatagagcagttttgcaacagactttttgcagaatctgcaagtggacatttgggaagctttgaggcctatggtggaaaatgatataccttcacataaaaaccagacagaagcattctcagcaactaatttgtgatgattgcattcaactcacagtgttaacctttattttcatagaacagttttgaaacactgtttttgtagcatctgcaagtggtcatttggagagctttgaggcctatggtggaaaaggaaatatctccacataaaaactggacagaagcattctcagaatctcctctgtgatgtttgcattcaactcactcagttgaacataccttttcatagagcagttttgaaacactcttttcgtagaatccacaagtggatatttggactgatttgaggcctttgttggaaacgggaataccttcacataaaatctagaaagaagaattctcagaaacttctttgtgatatgtgcattcaactcagagagttgaacttttctttcgatagagcagttttgaaacagactttttgtagaatctgcaagtggacatttgggaagctttgaggcctatggtggaaaatgatataccttcacataaaaagaagacagaagcattttcagaaacttctttgtgatgtttgcattcaactcacagagatgaaataccttttcatagcgcagttttgaaaaactctttccgtagtatctgcaaggggatatttggactgctttgaggccttcagtggaaacagaaatatcttaacataaaaattagacagaagcattctcagaaacttctttgtgatgaggccattcaactcacagagctgaaccactcttttgaaggagcagtttgaaacattctttttgtagaatctgcaagtgcaaagccaagagagctttgaggcctacagtggaaaaggaaatatcttcacataaaaactgaacagaagcattctcaaaaacatctttgtgatatttgcattcaactcacagagttgaaaataacttttcgtagagcagttttgaaacactctttttgtagaatctgcaagaggatatttggactgctttaaggacctcgttggaaacgggaatatcttcacataaaaactagagagaagcattctccgaaacacctttgtgatgggggcattcaacacagagagttgaacctttcttttgatagagcagttttgaaacactgtttttatagaatctgcaagtggacatttggagacttttgaagcatatggtggaaatggaaataccttcccatgaaaactagacagaaacattctcagtacctactttgttatgtttgcattcaactcacagagatggacataccttttcatagagcagttttggaaaactcttttggtagaatatgcaaatgcataattggaacgctttcaggccttcgttggaaatgtgaatatcttcaaataaaaactagacaaaagcattctcagaaacttctttgtgatgtgggcattcaactcacagacttgaacctttcttttcatagagcagtcttgaaacactctttttgaagaatctgcaaatggacatttggagagctttgaggcctatggtgagaaagaaaatatctccacataaaaaccagacagaagcattctgagaaacttctttgtgctgtttgcattcaactcacaaagttgaaaataccttttcatagaggagttttgaaacactcttttcgtagaatctgcaagtggatatttggactgcttttaggttttctttggaaacaggaatatctttacataaacactagacagatgcattctcagaaagttctttgtgatgtgtgcattcaactcacagatttgaacataccttgtcatagagcagttttgaaacactcgtttcgtagaatctgcaagtggatatttggactgctttgaggccttcatcggaaacgggaatatcttcacataagaactagacagaagaattctgggaaatttctttgtgatgtgtgcattcaactcacagagttgaacctttctgttgatagagcagtttggaaacactcttttcgcaaaatctgcagagtggatatttgtactgcttagaggccttcgttggaaacgggaatatctccacataaaaactagacagaagcattctcagaaacttccttgtattgtttgcattcaacccacagagttgaacataccttttcacagagcagtttttaaacactctttttgtagaatctgcaagtggacatttggaaagctttcaggcctgtggtggaaaaggaaataccttcacataaaaaccagatggaagcattctcagaaacttctttgtattgtttgcattcaacccacagagttgaacataccttttcacagagcagttttgaaacactctttttgtagaatctgcaagtggatatatggagtgctttgaggccttctttttaaacgggaatatcttcacataaaaactagagagaagcattctcagagccttctttgtgatgtgtgcattcaactcacagagctgaacctttcttttgatagagctgttttgaagcactgtttttttagaatctgcaagtggatatatggagtgctttgaggccttctttgtaaacgggaatatcttcacataaaaactagagagaagcattctcagaaccttctttgtgatgtgtgcattcaactcacggagctgaacctttcttttgatagagctgttttgaagcactgtttttttagaatctgcatgtggaaattttcagagcttcgaggcctgtggtggagaaggaaatatcttcacataaaaactagacagaagcattctcagaaatttgtttgtgacgtttgcattcaactcacagagttgaacataccttttcatagagcagttttgaaacactcttttcgtaggatctgcaaatggatatttggactgctttgaggccttcgttggaaagaggaatatcttcacataaaaactagacggaagcattctcagaaacttctttgtgatgtttgaattcaactctcagagttgaaggtttctattgatagagcaattttgaaaaaccgtttttgtagaatctgtcagtggacatttggagagcttggaagcctgcggtggaaaaggaaatatcttcacataaaaaccagacacaagaattctcagaaacttctttgtgatgtttgcattcaacgaagagagttgaacataccttttcatagagcagttttgaaacactcttttcgtagaatctgcaagtgtatatttggactgctttgaggccttcattgtaaacgagaatatcttcacataaaaacgagacagaagcattctcagcaactactttgtgatgattgcattcaactcactgtgttaacctttattttgatagggcagttttgaaacactgtttttgtagcatctgcaagtggtcatttggagagctttgaggcctatggtggaaaaagaaatatcttcacataaaaacaggacagaagcattttcagaatctccgctgtgatgtttgcattgaactcacagagttgaacgtcccctttcatagagcagttttgaaacactcttcgtagaatctgccagtggatatttggactgatttgaggcctttgttggacacgggaatatcttcatataaaaactagaaagaagcattctcagcaactactttgtgatgattgcattcaactcactgtgttaacctttattttgatagggcagtttgtaaacactgttttggtagcatctgcaagtgttcttttggagagctttgaggcctatggtggaaaatgatataccttcacatataaaccagacagaagcattttcagaaacttctttgcgatgtttgcattcaactcacagtgttaacctttattttcatagaacagttttgaaacactgtttttgtagcatctgcaagtggtcatttggagagctttgaggcctatggtggaaaaggaaatatctccacataaaaactggacagaagcattctcagaatctcctctgtgaagtttgcattcaactcacagagttgaacataccttttcatagagcagttttgaaacactcttttcgtagaatccacaagtggatatttggactgatttgaggcctttgttggaaacgggaataccttcacataaaatatagaaagaagaattctcagaaacttctttgtgatatgtgcattcaactcagagagttgaacttttcttttgatagagcagttttgaaacagactttttgtagaatctgcaagtggacatttgggaagctttgaggcctatggtggaaaatgatataccttcacataaaaagaagacagaagcattttcagaaacttcttgtgatgtttgcattcaagtcacagagatgaaataccttttcatagcgcagttttgaaaaactctttccgtagtatctgcaaggggatatttggactgctttgaggccttcagtggaaacagaaatatcttaacataaaaattagacagaagcattctcagaaacttctttgtgatgaggccattcaactcacagagctgaaccactcttttgaaggagcagtttgaaacattctttttgtagaatctgcaagtgcaaagccaagagagctttgaggcctacagtggaaaaggaaatatcttcacataaaaactggacagaagcattctcaaaaacatctttgtgatatttgcattcaactcacagagttgaaaataacttttcgtagagcagttttgaaacactctttttgtagaatctgcaagaggatatttggactgctttaaggacctcgttggaaacgggaatatcttcacataaaaactagacagaagcattctcggaaacacctttgtgatgtgggcattcaactcagagagttgaacatttcttttgatagagcagttttgaaacactgtttttatagaatctgcaagtggacatttggagacttttgaagcatatggtggaaatggaaataccttcccatgaaaactagacagaatcattctcagtacctactttgttaggtttgcattcaactcacagagatggacataccttttcatagagcagttttggaaaactcttttggtagaatatgcaaatggataattggaacgctttcaggccttcgttggaaatgtgaatatcttcaaataaaaactagacaaaagcattctcagaaacttctttgtgatgtgggcattcaactcacagtacttgaacctttcttttcatagaccagtcttgaaacactctttttgaagaatctgcaagtggacatttggagagctttgaggcctatggtgagaaagaaaatatcttcacataaaaaccagacagaagcattctgagaaacttctttgtgctgtttgcattcaactcacaaagttgaaaataccttttcatagaggagttttgaaacactcttttcgtagaatctgcaagtggatatttggactgcttttaggttttctttggaaacaggaatatctttacataaaaactagacagatgcattctcagaaagttctttgtgatgtgtgcattcaaatcacagatttgaacataccttgtcatagagcagttttgaaacactcgtttcgtagaatctgcaagtggatatttggactgctttgaggccttcgtcggaaacgggaatatcttcacataagaactagacagaagaattctgggaaatttctttgtgatgtgtgcattcaactcacagaagttgaacctttctgttgatagagcagtttggaaacactcttttcgcaaaatctgcaaagtggatatttgtactgcttagaggccttcgttggaaacgggaatatctccacataaaaactagacagaagcattctcagaaacttctttgtgatctgcacattcaacacaaagagttgaatcttccttttgatagagcagtttttaaacactctttttgtagaatctgcaagtggacatttggaaagctttgaggcctgtggtggaaaaggaaataccttcacataaaaaccagatggaagcattctcagaaacttctttgtattgtttgcattcaacccacagagttgaacataccttttcacagagcagttttgaaacactctttttgtagaatctgtaagttgatatatggagtgctttgaggccttctttgtaaacgggaatatcttcacataaaaactagacagaagcattctcagagccgtctttgtgatgtgtgcattcaacttacagagctgaacctttcttttgatagagctgttttgaagcactgtttttttagaatctgcaagtggatatattgagtgctttgaggccttctttgtaaacgggaatatcttcacataaaaactagagagaagcattctcagagccttctttgtgatgtgtgcattcaactcacagagctgaacctttcttttgatagagctgttttgaagcactgtttttttagaatctgcatgtggaaattttcagagcttcgaggcctgtggtggagaaggaaatatcttcacataaaaactagacagaaggattctcagaaacttctttgtgatggttgcattcaactcacagaattaaacataccttttcatagagaagttttgaaacacacttttcgtagaatctgcaaatggatatttggacggctttgaggccttcgttggaaatgggaaaatcttcacataaaaacgaaacagaagcattctcagaaacttctttgtgatgtgtgaattcaactctcagagttgaagctttctattgatagagcagttttgaaaaaccgtttttgtagaatctgccagtggacatttggagagctttgaggcctacggtggaaaaggaaatatcttcacataaaaaccagacacaaagattctcagaaacttctttgtgacgtttgcattcaactcacagagttgaacacaccttttcatagagctgttttgaagcactcttttcgtagaatctgcaagtgtatatttggaatgctttgaggccttcattgtaaacgagaatatcttcacatgaaaacgagacagaagcattctcagcaacgactttgtgatgattgcattcaactcactgtgttaacctttattttgatagggcagttttgaaacactgtttttgtagcatctgcaagtggtgatttggagagctttgaggcctatggtggaaaaggaaatatcttcacataaaaacaggacagaagcattttcagaatctccgctgtgatgtttgcattgaactcacagagttgaacgtcccttttcatagagcagttttgaaacactcttcgtagaatctgccagtggatatttggactgattggaggcctttgttggacacgggaatatcttcatataaaaactagaaagannnnnnnnnnnnnnnnnnnnnnnnnnnnnnnnnnnnnnnnnnnnnnnnnnnnnnnnnnnnnnnnnnnnnnnnnnnnnnnnnnnnnnnnnnnnnnnnnnnnagcattcatagaaacttctttgtgatgtatgcattcaactcacagagttgaaactatcttattattgagcagttttgaatctctctttttgcagaatctgcaactggatatttggagcgctttgaggcctaccgtggaaaagcaaatatcttcagataaaagctacacagaagctttctgagaaacttttttgcgatgtgtgcattcaactcacagagttgaaactttcttttgattgagcagatttgaaacactctttttgtagaaactgtaagttgatatttggagccctttgaggcctattgtggaaaaggaaatatcttcacgtaaaaactacatagaaccattctgagatacttctttttgatgtttgcattcatctcacagtgttgaaagtttcttttgattgagcagttttgaaacactctttttgtagaatctgcaagtgaataattggagccctttgagggctatggtagaaaaggaaatatcttcaaataagaactacaaagaaacattctcagaaacttatttgtgatgtgagcattcaactcacagacctgaacatatcttttgatttagcacttttgaatttctctttttgtagaatttgcaagtggatatttggagcgctgtgagacctactgtgggaaatgaaatatgttcacataaaaactactcagaaccattctgagaaacttctttgtgtcgtgtgcattcgactcacagagttgaacatatgtcctctttgagcagttttgcgtctctctttttgtagaatgtacaagtggatatttggagcccattgtgtcctatggtggaaaaggaaatatcttcagataaaaattacacagaagaattctgagaaacttctttgtgatatgtgcatttatctcacaggtttgaacctaccgttttattgagcagttttgaaacactgtttttgtagaatctgcaagtggatatttagagggaattgaggcctaccgtggaaaagcatatacctacaaacaaaaactaaacagaagcattctgagaaacttcttagtgatgtgtgcattcgtctcacagagttgaaactttcctttgattgagcagttttgaaacactctttttgtagaatctgcaactggatatttggagccctttgaggaatattgtggaaaaggaaatatcttcacataaaaactacacagaagcattctgagaaacttctttatgaggagtccattcaacccacagagttaaacttttcttctcattgagcagttttgaatctctctatttgtagaatctgcaagtggatatttgctgccctttgaggcatactgaggaaaagcaaatatcttcatataaaaactacacagaagcattctgagaaacttctttgggatgtgtgcattcaactcacagagttgaacctatcttttgattgagcagatttgaatctctcttttggcagaaactgcaagtagatatttggagccatttgcggccttttgtggaaaaagaaatattttcaaataaaaactaaacagaaacatactgagaaacttctttgtgatgtgtgcattcatctcacagggttgaaactatcttatgattgagcagttttgaaacactctttttgtagaatctgcaactggatatttggagccctttgagggctattgtggaaaagtaaatatcttcacataaaaactattcaggagcattctgataaacttctttgtgatgtatgcattcaactcacagacttgaacctatcttaagaatgagcagttttgaatctctctttttgcagaatctgcaactggatattttgagggccttaaggcctaccgtggaaaagcaattatcttcagattaaaactacacagaagcattcagagaaacatctttgtgatgtttgcattcatctcacagagttaaaactttctcttgatggagcagttttgaaacactctttttgtagaatctgcaagtggatatttggagccctttgaggcctgttgtggaaaaggaaatatcttcccatgaaaactacatagaagtattctgagaaacttctttgcaatgtgtgcattcaactcacaagagttgaacctatcttttgattgaggatttttgaatctttctttttgcagaatctgcaagtgtatgtttgcaaagctttgtggcctattgtggaaaaggaaatgtcttcacataaaaactacacataaatattctgggaaagttctttgtggtgcgtgcattcatgtcatagagttgaaactttcttttgatggagcagttttgaaacactctttttgtacaatctgctagtggataattggagccctttgaggactattgtggaaaaggaaatatcttcaaataaaaactacacagaagcattctgataaacttctttctgatgtgtgcattcaactcacagagttgaacctatattttgattgagcagtttagaagctctctttttgcagaatctgcaagtggatgtttggagagctttgaaacctattatggaaaagcaaatatcttcacataaaaactacacagaagcattctgagaaacttctctgtgaggtgtgcactcaacccacagagtttaacttattttctcattgagcagttttgaatctctctttttataaaatctgcaggtagatatttggagctctttgagccccatggtggaaaaggagatatcttcaaataaaaactacacagaagcattcatagaaatttctttgtgatgtatgcattcaactcacagagttgaaactatcttattattgagcagtttttaatctctcttttgcagaatctgcaagtggatatttggagcgctttgaggcctactgtggaaaagcaaataacttcagataaaagctacacaaaagctttctgagaaacttttttgcgatgtgtgcattcaactcacagagttgaaactttcttttgattgagcagatttgaaacactctttttgtagaaactgtaagttgatatttggagccctttgaggcctattgtggaaaaggaaatatcttcacataaaaactacatagaatcattctgagatacttctttgtgatgcttgcattcatctaacaatgttgaaactttcttttcattgagcagttttgaaacactctttttgtagaatctgcaagtggaataattggatccctttgcgccctgtggtggagaaggaaatatcttcaaataagaactacacagaaacattctcagaaacttatttgtgatgtgtgcattcaactcacagggctgaacatatcttttgatttagcagttttgaatttctcttttggcagaatctgcaaggggatgtttggagagctttcaggcatattgtggaaagggaaatattttcacataaaaactacacagaaccattctgagaaacttctttgtgtcgtgtgcattcaactcacagagttgaacatatgtcctctttgagcagttttgcgtctctctttttgtagaatgtacaagtggatatttggagcccattgtgtcctatggtggaaaaggaaatatcttcagataaaaattacacagaagaattctgagaaacttctttgtgatatgtgcatttatctcacaggtttgaacctaccgttttattgagcagttttgaaacactgtttttgtagaatctgcaagtggatatttagagggaattgaggcctaccgtggaaaagcatatacctacaaacaaaaactaaacagaagcattctgagaaacttcttagtgatgtgtgcattcgtctcacagagttgaaactttcctttgattgagcagttttgaaacactctttttgtagaatctgcaactggatatttggagccctttgaggaatattgtggaaaaggaaatatcttcacataaaaactacacagaagcattctgagaaacttctttatgaggagtccattcaacccacagagttaaacttttcttctcattgagcagttttgaatctctctatttgtagaatctgcaagtggatatttgctgccctttgaggcatactgaggaaaagcaaatatcttcatataaaaactacacagaagcattctgagaaacttctttgggatgtgtgcattcaactcacagagttgaacctatcttttgattgagcagatttgaatctctcttttggcagaaactgcaagtagatatttggagccatttgcggcctttggtggaaaaagaaatattttcaaataaaaactaaacagaaacattctcagaaacttatttgtgatgtgtgcattcaactcacagggctgaacatatcttttgatttagcagttttgaatttctctttttgtagaatttgcaagtggatatttggagcactgtgagacctactgtgggaaatgaaatatgttcacataaaaactactcagaagcattctgagaaactactttgtgatgtgtgcattcaactcacagagttgaacctatcttttgatcgagcagttttgaatctctctttttgcagaatctgcaagcggatgtttggagaacgttgaggcttattatgtaaaagggaatattttcacataaatactacacagaagcattcagagaaacatctttgtgatgtttgcattcatctcacagagttaaaactttctcttgatggagcagttttgaaacactctttttgtagaatctgcaagtggatatttggagccctttgaggcctgttgtggaaaaggaaatatcttcccatgaaaactacatagaagcattctgggaaacttctttgggatgtgtgcattcaactcacagagttgaacctatcttttgattgagcagtttggaatctctctttttgaagaatctgcaagtgtgtgttttcaaagctttgtggcctattgtggaaaaggaaatatcttcacataaaaactacacataaacattctgagaaagttctttgcggtgtgtgcattcatctcacggagttgaaactttcttttgattgagcagttttgaaacactctttttgtacaatctgcaagctgataattggagccctttgaggactattgtggaaaaggaaatatcttcacataaaaactactcagaagcattctgataaacttctttctgatgtgtgcattcaactcacagagttgaacctatattttgattgagcagtttagaggctctctttttgcagaatctgcaagtggatgtttggagagctttgaaacctattatggaaaagcaaatatcttcacataaaaactacacagaagcattctgagaaacttctctgtgaggtgtgcactcaacccacagagtttaacttattttctcattgagcagttttgaatctctctttttataaaatctgcaggtagatatttggagctctttgagccccatggtggaaaaggaaatatcttcaaataaaaactacacagaagcattcatagaaatttctttgtgatgtatgcattcaactcacagagttgaaactatcttattattgagcagtttttaatctctcttttgcagaatctgcaagtggatatttggaacgctttgaggcctactgtggaaaagcaaataacttcagataaaagctacacaaaagctttctgagaaactttttttgcgatgtgtgcattcaactcacagagttgaaactttcttttgattgagcagatttgaaacactctttttgtagaaacggtaagttgatatttggagccctttgaggcctattgtggaaaaggaaatatcttcacgtaaaaactacatagaaccattctgagatacttctttttgatgtttgcattcatctcacagtgttgaaactttcttttgattgagcagttttgaaacactctttttgtagaatctgcaagtgaataattggagccctttgagggctatggtagaaaaggaaatatcttcaaataagaactacaaagaaacattctcagaaacttatttgtgatgtgtgcattcaactcacagggctgaacatatcttttgatttagcagttttgaatttctctttttgcagaatctgcaaggggatgtttggagagctttcaggcatattgtggaaagggaaatattttcacataaaaactacacagaaccattctgagaaacttctttgtgtcgtgtgcattcaactcacagagttgaacatatgtcctctttgagcagttttgcgtctctctttttgtagaatgtacaagtggatatttggagcccattgtgtcctatggtggaaaaggaaatatcttcagataaaaattacacagaagaattctgagaaacttctttgtgatatgtgcatttatctcacaggtttgaacctaccgttttattgagcagttttgaaacactgtttttgtagaatctgcaagtggatatttagagggaattgaggcctaccgtggaaaagcatatacctacaaacaaaaactaaacagaagcattctgagaaacttcttagtgatgtgtgcattcgtctcacagagttgaaactttcctttgattgagcagttttgaaacactctttttgtagaatctgcaactggatatttggagccctttgaggaatattgtggaaaaggaaatatcttcacataaaaactacacagannnnnnnnnnnnnnnnnnnnnnnnnnnnnnnnnnnnnnnnnnnnnnnnnnnnnnnnnnnnnnnnnnnnnnnnnnnnnnnnnnnnnnnnnnnnnnnnnnnnggcattctgagaaacttcttcgtgatgtgtgcattcatctcacagagttgaacctatcttatgattgagcagatttgaaacactggctttgtagatgctgcaagtggatatttggagcgctttgaggcctactgtggaaaaggaaatattttcacataaaaaccacacagaagccttctgagaaacttctttgtgatgtgtccattcaactcactgccttgaacctatcttttgattgagcagtttcggatctctctttttcaggaacctgcaagtggatgtttggagccctttgcggtccatggaggcaaaggaaatatcttcaaataaaaactacacagaagcgttctgagaaacttctttgtgatgtgtgcattcatctcacagagaagaacctatcttatgactgagcagctttgaaacactctctttgcagaatcttcaggtgtatatttggagtgctttttggcctattttgtaaaaggaaatatcttcacataaaacctacacagatttattctgagaaactactttttgttgtgtgtattcatctaacagagttgtacgtttcttttgattgagcagttttgaaacacagtttttacagaatgtgcaagtggatatttggagcgctttggggcctactgtggaaaagcaaatatcttcacgtaaaaaccacacagaagcattctaagaaacttctttgtgatgtgtgcattcatcccacagagatgaaagtttcttttgattgagaacttttgaaacactctttttgtagaatctgcaagtggatatttggagcgcttttagacctactgtggaaaaggaaatatcttcccataaaaactacacagaagcattctgagaaacttctttgcaatgtgtgcattcaactcatagagttgaacctatcttttgattgagcagttttgaatttctctgtttgcagaatctgcaagtggatatttgaaaccctttgcagccaatggaggataaggaaatatcttcaaataaatactacacagaagcattctgagaaacttctttgtgatgtgtgcattcatctcatagatttgaacatatcttatgattgagtacatttgaaacactctctttgtagaatctgcaagtggatacttggagggctttcaggactgttgtggaaaaggaaatatcttcacgtaaaaacttcacaaaagcattctgagatacttctttatgatgtatgcactcaactcagagagttgaacctatcttttgattgagaagttttgaaacactctgtttgtagaatctgcaagtggatatttggagtgctttgaggcctattgtggaaaaggtaatatcttcacataaaaactacaaataagcattctgagaaacttctttgtgatgtgtgaattcaagtcacagagtttaacctatcttttgattgagcagttttgaatctctctttttgtagaatctgcaagtggatatttggtgggctttgaggcctattttggaaaaggaaacatcttcacataaaaactacacagaagccttctgagaaacttctttgtgatgtgtccattcaactcacagccttgaacctatcttttgattgagcagtttcggatctctctttttcaggaacctgcaagtggatgtttggagccctttgcggtccatggaggcaaaggaaatatcttcaaataaaaactacacagaagcattctaagaaacttctttgtgatgtgtgcattcatcccacagagatgagcagtttcaattgagcagttttggatctctctttttctcggatttgcaagtggatatttggagccctttgcagtccatggaggcaaaggaaatatcttcaaataaaaactacaaatatttattctgagaaactactttttgttgtgtgtattcatctaacagagttgtacgtttcttttgattgagcagttttgaaacacagtttttacagaatgtgcaagtggatatttggagcgctttggggcctattgtggaaaagcaaatatcttcacgtaaaaaccacacagaagcattctgagaaacaactctgtgatgtgtgcattcatcccacagagttgaaagtttcttttgattgagaacttttgaaacactctttttgtagaatctgcaagtggatatttggagtgcttttagacctattgtggaaaaggaaatatcttcccataaaaactacacagaagcattctgagaaacttctttgtgatgtgtgcattcatctcatagagttgaacgtatcttttgattgaacagttttgaatttctctttttgcagaatctgcaagtggatatttgaagccctttgcagccaatggaggataaggaaatatcttcaaataaatactacacagaagcattctgagaaacttctttgtgatgtgtgcattcatctcatagatttggacatatcttatgattgagtacatttgaaacactctctttgtagaatctgcaagtggatacttggagggctttcaggactgttgtggaaaagaaaatatcttcacgtaaaaactacacaaaagcattctgagatacttctttatgatgtatgcattcaactcagagagttgaacctatcttttgattgagaagttttgaaacactctgtttgtagaatctgcaagtggatatttggagtgctttgaggcctattgtggaaaaggtaatatcttcacataaaaactacaaataagcattctgagaaactactttgtgatgtgtgtgttaaactcacagaggtgaacttatcttttgattgagcagatttgaatatctctttttgtaggagctgcaagtgggtatttggagccctttgaggcctattgtggaaaagaaaatatcttcacataaaaacaacacagaagcattctgagaaacttctttgtgatgtgtgcattcaactcacagtcttgaacctatctttcaattgagcatttttggatctctctttttctcggatttgcaagtggatatttggagccctttgcagtccatggaggcaaaggaaatatcttcaaataaaaactacacagaagcattctgagaaacttctttgtgatgtgtgcattcatctcacagagatgaacctatcttatgactgagcagctttgaaacagtctctttgcaaaatcttcaggtgtatatttggagtgctttttggcctattgtgtaaaaggaaatatcttcacataaacctacacagannnnnnnnnnnnnnnnnnnnnnnnnnnnnnnnnnnnnnnnnnnnnnnnnnnnnnnnnnnnnnnnnnnnnnnnnnnnnnnnnnnnnnnnnnnnnnnnnnnnggaattctgagagacttctttgtgatgcgtgtactcatcttacagagttaaaccttccttttgaatgagcagatttgaaactgtctttttgtagaatctgcaagtggacattttgagcgccttgaggcctatggtggaaaagaaaatgccttcacatgaaaactagacagaagaattctgagaaacttctttcttatgtgtgcgttaatctcacacagttgaacctttcttttgattgagcagtttcaaacactctttttgtagaatctgcaagtggacttttggagcactttgtggcctacggtagaaaaggaaatatcgtcacataaaatctagacagaagcaatctgagacttctttgtgatgtgtgcattcaccacacattgtgtaacctttcccttgattgagcagttttgaaactctttttgtagaatctacaagtctacatttggagtgctttgaggcctatggtagaaaaggaaatatcttcacataaaaactagtcaaaagaattctgagaaactgcttggtgatgtgtgcgttcaccacacagagctgaaccattgttttgattgagcagtttggaaaccctctttttgtagaatatgcaagtggacatttggagtactttgatgcccctggtcgaaaaggaaatatcttaacttaaaaactagacagaataattctgggaaacttctttctgatgtgtgcgttcatctcacagagttaaacttttcattttattgagcagtttggaaacactctttttgtagaatctgcaagtggacatttggagcgcattgtggtatgcagtagaaaaggaaatgtctccacaaaaaatgtagacagaagcagtcttataaacttctttgtgatgtgtgcattcatttcacagatttgaacctatctttagattgagcagtttggaaacactctttttgtagaatctgcaagtgcacacgtggagagatttgcggccaatggtagagaagcaaatatcttcgcataaactctagacagaagcattctgacaaacttctttgtgatgtgtgcattcatctcacaaagaattgaaactttctttgattcaggagctttgaaacactctttttgtagaatctgcaagtgtacatttggagcgctttgaggcctatggtggaaaagggaacatcttcacatatagaacagacagaagccttctgacaaacttcttttcaatgtgtgcgttcaactcaaagatttgaaccttacttttcattgagcagatttgaaacactctttttgtagaatctgcaagtggacaattggaccgctttctggcctatggtggaaaaggatgtatcgtcacataaaaactagacagaaatcttctgacaaacttctttgttatgcatgcattcatctttcagagttgaaccttccttttgattgagcaactttgaaacactctttttgtagaatctgcaagtagtcatttgtagcgctttggagactatggcgaaaaaggaaatatcttcccataaaaactagacagaggcattctgacaaacttctttgtgatgtgggcattcatctcacagagttgaaccttacttttcattgagctattttgaaacactctttttggagaatctgtaagtggactttttgagggctttgacgcacgtggtggaaaaggaaatatcttcatataaaaactagacagaaggattctgagaaacttctttgtgatgtgtgcattcatctcacagagttgaaccttacttttcattgagcagttttgaaacactctttttgtagaatctgcaagtggacatttggagaactttgaggcctgtggtgtaaaaggaaatatcttcacataaaaactagacagaagcattctgacaaacgtctttgtgatgtgtgctttcatctcacagagttgaacatttcttttgatttagcagctttgaaacactctttttgtagaatctgccgttggacatttgcggcacttcaagccaatggtagaaaaggaaataccttcacatagaaagtagatagaagcattctgacaaactactttgtgatgtgtacattcatctcacagagctggacctttcttttgattgagcagctttgaaacactctttttgtagaatctgcaattgtacatttggagcgctttgaggtctatggtcgaaaagcaaatatcttcacagaaaaactagacagaaacattctgagaaatttctttgtgatgtgtgcaatcatctcacagagttgaaccttacttttgattgtctagttttgaaaaactctttttgtagaatctgaaagtggacatttggagcgctttgagtcctatgatggataacgaaatatcttcatataataaatagagagaactattctgagaaacttctttgggatgtgtgctttcatctcacagagtaaaacattcttttgatcgagcagttttgtaagtctctttttgtagaatctgcaagtggacattttgagtcctttcaggcctatggtggaaaaagaaatatctacaaattgaaactcgacagaagaattctgagaaactcctttgtgatgcttgcattcatctaacagacttgaacctttctttatgattgagcagtttggaaaccctctttttgtagaatctgctagcggatatctggagcgttttgcagcctatggtggaaaaggaaatatcttcacataaaaactaaacagatgtattctgagaaacttctatgtgatgtgtgcattcatctcacagagttgaacctttcttttgattgagcagtttggaaacactctttttgtagagtctgcaagtggacgtatggaatgctttgaagcctatggtagaacaggaaatatcttcacataaaatctagacagaggaattctgagagacttctttgtgatgcgtgtactcatcttacagagttaaaccttccttttgaatgagcagatttgaaactgtctttttgtagaatctgcaagtggacattttgagcgccttgaggcctatggtggaaaagaaaatgccttcacatgaaaactagacagaagaattctgagaaacttctttctgatgtgtgcgttaatctcacacagttaaacctttcttttgattgagcagtttcaaaacactctttttgtagaatctgcaagtagacatttggagggctttgtggcctacggtagaaaaggaaatatcatcacataaaatctagacagaagcaatctgagacttctttgtgatgtgtgcattcaccacacattgtttaacctttcccttgattgagcagttttgaaactctttttgtagaatctaccagtctacatttggagtgctttgaggcctatggtggaaaaggaaatatcttcacataaaaactagtcaaaagcattctgagaaacctctttgtgatgtttgtattcatctcccagagctgaaccattctttttatggacagttttgaaatactctttttgtagaatctgcaagtggacaatttgagcaccttgtggcctctggtggaaaatgaaatatctttacataaaaactagactgaagcattatgataaactttttgtgatgtctgcatacatctcacaaggagttgaaactttcttttgattgagaagctttgcaacattctttttgtagaatctgcaagtggacatttggagtgctttgaggcctatggtggataacgaaatatgttcacataaaaattggacagaagcattctgagaaacttctttgtgatgtgcgcattcatctcacagagttgaacctcccttttgattgagcactttggaagcactctttctgtaaaatctgcaagtggacaattggagtgctttgaggtctatggtggaaaacgaaatatcttcacataaaaattggacagaagcattctgacaaacttctttgtgatgtgtgcattcatctcacaaagaattgaaactttctttgattcaggagctttgaaacactctttttgtagaatctgcaagtgtacatttggagcgctttgaggcctatggtggaaaagggaacatcttcacatatagaacagacagaagcattctgacaaacttcttttcaatgtgtgcgttcaactcaaagatttgaaccttacttttcattgagcaggtttgaaacactctttttgtagaatctgcaagtggacaattggaccgctttctggcctatggtggaaaaggatgtatcgtcacataaaaactagacagaaatcttctgacaaacttctttgttatgcatgcattcatctttcagagttgaaccttccttttgattgagcaactttgaaacactctttttgtagaatctgcaagtagtcatttgtagcgctttggagactatggtgaaaaaggaaatatcttcccataaaaactagacaaaagcattctgacaaacttctttgtgatgtgggcattcatctcacagagttgaaccttacttttcattgagcaattttgaaacactctttttggagaatctgtaagtggacattttgagggctttgacgcacatggtggaaaaggaaatatcttcatatatcttcatataaaaaacagaagcattctgacaaccttcatggtgatatgtgcattcatctcccagagttgaaccttagttttgattgagcagttttgaaacaccctttttgtagtatctgcaagaggacatttagagtgctttgaggcctatggtggaaaaggaaataccctcatataaaaacgagacagaagcattctgacaaactactttgtgatgtgtacattcatctcacagagctggacctttcttttgattgagcagctttgaaacactctttttgtagaatctgcaattggacatttggagcgctttgaggtctatggtcgaaaagcaaatatcttcacagaaaaactagacagaagtattttgaaaaacttcattgtgacgtttgcattcatctcactgacgtgaacctttcttttgattgagcagttttgaaaaactctttttgtaggatctgcatgtggacatttggatcgctttgaggcctatggaggaaaagaaaatatctccacctaaaaaccatacagaattattctgagaaacttctttgtgatgtgtgcattcatctcacaaagttgaaccttacttttcattgagcaattttgaaacactctttttgtagaatctgcaagtggacatttggagcacttttagatctatggtggaaaaggaaatatcttcacataaaaactagacagaactattctgagaaacttctttgggatgtgtgctttcatctcacagagtaaaacattcttttgatcaagcagttttgtaagtctctttttgtagaatctgcaagtggacattttgagtcctttcaggtctatggtggaaaaggaaatatctacaaattgaaacttgacagaagaattctgagaaactcctttgtgatgcttgcatttatctaacagagttgaacctttctttatgattgagcagttcggaaaccctctttttgtagaatctgctagcggatatttggagcgttttgcagcctatggtggaaaaggaaatatcttcacataaaaactaaacagatgtattctgataaacttctatgtgatgtgtgcgttcatctcacagagttgaacctttcttttgattgagcagtttggaaacactcttttcgtagaatctgcaagtagacgtatggaatgctttgaagcctatggtagaacaggaaatatcttcacataaaatctagacagaggaattctgagagacttctttgtgatgcgtgtactcatcttacagagttaaaccttccttttgaatgagcagatttgaaactgtctttttgtagaatctgcaagtggacattttgagcgccttgaggcctatggtggaaaagaaaatgccttcacatgaaaactagacagaagaattctgagaaacttctttctgatgtgtgcgttaatctcacacagttgaacctttcttttgattgagcagtttcaaaacactctttttgtagaatctgcaagtagacatttggagggctttgtggcctacggtagaaaaggaaatatcatcacataaaatctagacagaagcaatctgagacttctttgtgatgtgtgcattcaccacacattgtttaacctttcccttgattgagcagttttgaaactctttttgtagaatctacaagtctacatttggagtgctttgaggcctatggtggaaaaggaaatatcttcacataaaaactagtcaaaagaattctgagaaacttcttggtgatgtgtgcgttcacctcacagagctgaaccattgttttgattgagcagtttggaaaccctcttttcgtagaatatgcaagtggacatttggagtactttgatgcccctggtcgaaaaggaaatatcttaacttaaaaactagacagaagcattctgagaaacttctttctgatgtgtgaattcatctcacagggttgaacctctcttttgaaagaccagttttgaaatatgctttttgtagaatctgcaagtagaattttcgagagccatgaggcctatggtggaataggaaatatctccacataaaaactagacagaactattctgagaaacttctttgggatgtgtgctttcatctcacagagtaaaacattcttttgatcgagcagttttgtaagtctctttttgtagaatctgcaagtggacattttgagtcctttcaggtctatggtggaaaaggaaatatctacaaattgaaacttgacagaagaattctgagaaactcctttgtgatgcttgcattcatctaacagacttgaacctttctttatgattgagcagtttggaaaccctctttttgtagaatctgctagcggatatctggagcgttttgcagcctatggtggaaaaggaaatatcttcacataaaaactaaacagatgtattctgagaaacttctatgtgatgtgtgcattcatctcacagagttgaacctttcttttgattgagcagtttggaaacactctttttgtagagtctgcaagtggacgtatggaatgctttgaagcctatggtagaacaggaaatatcttcacataaaatctagacagaggaattctgagagacttctttgtgatgcgtgtactcatcttacagagttaaaccttccttttgaatgagcagatttgaaactgtctttttgtagaatctgcaagtggacattttgagcgccttgaggcctatggtggaaaagaaaatgccttcacatgaaaactagacagaagaattctgagaaacttctttctgatgtgtgcgttaatctcacacagttaaacctttcttttgattgagcagtttcaaaacactctttttgtagaatctgcaagtagacatttggagggctttgtggcctacggtagaaaaggaaatatcatcacataaaatctagacagaagcaatctgagacttctttgtgatgtgtgcattcaccacacattgtttaacctttcccttgattgagcagttttgaaactctttttgtagaatctaccagtctacatttggagtgctttgaggcctatggtggaaaaggaaatatcttcacataaaaactagtcaaaagaattctgagaaactgcttggtgatgtgtgcgttcaccacacagagctgaaccattgttttgattgagcagtttggaaaccctctttttgtagaatctgcaagtggacaatttgagcaccttgtggcctctggtggaaaatgaaatatctttacataaaaactagactgaataattctgggaaacttctttctgatgtgtgcgttcatctcacagagttaaacttttcattttattgagcagtttggaaacactctttttgtagaatctgcaagtggacatttggagcgcattgtggtatgcagtagaaaaggaaatgtctccacaaaaaatgtagacagaagcattctgagaaacttctttgtgatgtgtgcattcatcttacagggttgaacctcccttttgattgagcactttggaagcactctttttgtaaaatctgcaagtggacaattggagtgctttgaggcctatggtggaaaaggaaatatcttcacttaaaaactagacagaagcattctgacaaacttctttgtgatgtgtgcattcatctcacaaagaattgaaactttctttgattcaggagctttgaaacactctttttgtagaatctgcaagtgtacatttggagcgctttgaggcctatggtggaaaaggggacatcttcacatatagaacagacagaagcattctgacaaacttctttttgatgtgtgcgttcaactcacagatttgaaccttacttttcattgagcagatatgaaacactccttttgtagaatctgcaagtggacaattggaccgctttgtggcctatggtggaaaaggatatatcgtcacataaaaactagacagaaatcttctgacaaacttctttgttatgtgtgcattcatctttcagagttgaacctttcttttgattgagcaactttgaaacactgtttttgtagaatctgcaagtagtcatttggagcgctttggggcctatggcaaaaaaggaaatatcttcacataaaaactagacagaagcattctgacaaacttctttgtgatgtgtgcattcatctcacagagttgaaacttacttttcattgagcaattttgaaacactctttttggagaatctgtaagtggacattttgagggctttgacgcacatggtggaaaaggaaataccttcacataaaaacgagacagaagcattctgacaaacttctttgtgatgtgtgcattcatctcacagagttgaaccttacttttcattgagcaattttgaaacactctttttggagaatctgtaagtggacattttgagggctttgacgcacatggtggaaaaggaaataccttcacataaaaacgagacagaagcattctgacaaactactttgtaatgtgtgcattcatctctcagagctggacctttcttttggttgaacagctttgaaacactctttttgtagaatctgcaagtggacatttggagcgctttgaggcctatggtggaaaaggaaatatcttcacagaaaaactagacagaagaattctgagaaacttcttgttgatgtgtgtgttcacctcacagagttgaaccgttgttttgattgagcagtttggaaaccctctttttgtagaatctgcatgtggacatttggagcgctttgaggcctatggtggaaaaggaagtatcttcacataaaaactagacagaattattctgagaaacttctttgtgatgtgtgaattcatctcacaaagttgaaccttacttttcattgagcaattttgaaacactctttttgtagaatctgcaagtggacatttggagcacttttagatctatggtggaaaaggaaatatcttcacataaaaactagacagaactattctgagaaacttctttgggatgtgtgctttcatctcacagagtaaaacattcttttgatcgagcagttttgtaagtctctttttgtagaatctgcaagtggacattttgagtcctttcaggcctatggtggaaaaggaaatatctacaaattgaaactcgacagaagaattctgagaaactcctttgtgatgcttgcattcatctaacagacttgaacctttctttatgattgagcagtttggaaaccctctttttgtagaatctgctagcggatatctggagcgttttgcagcctatggtggaaaaggaaatatcttcacataaaaactaaacagatgtattctgagaaacttctatgtgatgtgtgcattcatctcacagagttgaacctttcttttgattgagcagtttggaaacactctttttgtagagtctgcaagtggacgtatggaatgctttgaagcctatggtagaacaggaaatatcttcacataaaatctagacagaggaattctgagagacttctttgtgatgcgtgtactcatcttacagagttaaaccttccttttgaatgagcagatttgaaactgtctttttgtagaatctgcaagtggacattttgagcgccttgaggcctatggtggaaaagaaaatgccttcacatgaaaactagacagaagaattctgagaaacttctttctgatgtgtgcgttaatctcacacagttaaacctttcttttgattgagcagtttcaaaacactctttttgtagaatctgcaagtagacatttggagggctttgtggcctacggtagaaaaggaaatatcatcacataaaatctagacagaagcagtcttataaacttctttgtgatgtgtgcattcatgtcacagatttgaacctatctttagattgagcagtttggaaacactctttttgtagaatctgcaagtgcacatgtggagagatttgtggccaatggtagagaagcaaatatcttcgcataaactctagacagaagcattctgagaaacctctttgtgatgtttgtattcatctcccagagctgaacctttcttttgatggacagttttgaaatactctttttgtagaatctgcaagtggacaatttgagcaccttgtggcctctggtggaaaatgaaatatctttacataaaaactagactgaataattctgggaaacttctttctgatgtgtgcgttcatctcacagagttaaacttttcattttattgagcagtttggaaacactctttttgtagaatctgcaagtggacatttggagcgcattgtggtatgcagtagaaaaggaaatgtctccacaaaaaatgtagacagaagcagtcttataaacttctttgtgatgtgtgcattcatcttacagggttgaacctcccttttgattgagcactttggaagcactctttttgtaaaatctgcaagtggacaattggagtgctttgaggcctatggtggaaaaggaaatatcttcacttaaaaactagacagaagcattctgacaaacttctctgtgatgtgtgcattcatctcacaaagaattgaaactttctttgattcaggagctttgaaacactctttttgtagaatctgcaagtgtacatttggagcgctttgaggcctatggtggaaaaggggacatcttcacatatagaacagacagaagcattctgacaaacttcttttcgatgtgtgcgttcaactcacagatttgaaccttacttttcattgagcagatatgaaacactccttttgtagaatctgcaagtggacaattggaccgctttgtggcctatggtggaaaaggatatatcgtcacataaaaactagacagaaatcttctgacaaacttctttgttatgcatgcattcatctttcagagttgaaccttccttttgattgagcaactttgaaacactctttttgtagaatctgcaagtagtcatttgtagcgctttggagactatggcgaaaaaggaaatatcttcccataaaaactagacaaaggcattctgacaaacttctttgtgatgtgggcattcatctcacagagttgaaccttacttttcattgagctattttgaaacactctttttggagaatctgtaagtggactttttgagggctttgacgcacgtggtggaaaaggaaatatcttcatataaaaactagacagaagcattctgacaaccttcattgtgatatgtgcattcatctcccagagttgaaccttagttttgattgagcagttttgaaacaccctttttgtagtatctgcaagaggacatttcgagtgctttgaggcctatggtggaaaaggaaataccctcatataaaaacgagacagaagcattctcacaaactgctttgtgatgtgtgcattcatctcacaaagttgaaactttcttttgattgagcagctttgaaacactctttgtagagtctgcaagtggacatttggagcactttgaggcctacagtggaaaaggaaataccttcacataaaaattagacagaagcattttgaaaaacttctttgtgacgtttgcattcatctcactgacttgaaactttcttttgattgagcggttttgaaaaactctttttgtaggatctgcaagtggacatttagagcgctttgaggcctatggtggaaaagaaaatatcttcacctaaaaaccagacagaagcattctgacaaccttcattgtgatatgtgcattcatctaagagagttgaaccttacttttgattcagcagttttgaaactctctttttgtagaatctgcaagtggacattcggagcacttttagacctatggtggaaaaggaaatatcttcacataaaaactagacagaactattctgagaaacttctttgggatgtgtgctttcatctcacagagtaaaacattcttttgatcgagcagttttgtaagtctctttttgtagaatctgcaagtggacattttgagtcctttcaggcctatggtggaaaaggaaatatctacaaattgaaactcgacagaagaattctgagaaactcctttgtgatgcttgcattcatgtaacagagttgaacctttctttatgattgatcagtttggaaaccctcttttttagaatctgccagcggatatttggagcgttttgcagcctatggtggaaaaggaaatatcttcacatgaaaactaaatagatgtattctgagaaacttctatgtgatgtgtgcgttcatctcacagagttgaacctttcttttgattgagcagtttggaaacactctttttgtagaatctgcaagtggacgtatggaatgctttgaagcctatggtagaacaggaaatatcttcacataaaatctgaacagaggaattctgagagactcctttgtgatgtttgtattcatcttacagaattaaaccttccttttgaatgagcagatttgaaactgtctttttgtagaatctgcaagtggacattttgagcgcctggaggcctatggtggaaaagaaaatggcttcacatgaaaactagacagaagcattctgacagacttctttgtgatttgtgcattcatctcatagagttgaaccttacttttcattgagcagctttgaaacactctttttgtagaatgtgcaagtggacatttggagccctttgaggcctatggtggaaaaggaaatatcttcacataaaaactagacagaagcaatctgagacttctttgtgatgtgtgcattcaccacacattgtttaacctttcccttgattgagcagttttgaaactctttttgtagaatctaccagtctacatttggagtgctttgaggcctatggtggaaaaggaaatatcttcacataaaaactagtcaaaagcaattctgagaaactgcttggtgatgtgtgcgttcaccacacagagctgaaccattgttttgattgagcagtttggaaaccctctttttgtagaatctgcaagtggacaatttgagcaccttgtggcctctggtggaaaatgaaatatctttacataaaaactagactgaataattctgggaaacttctttctgatgtgtgcgttcatctcacagagttaaacttttcattttattgagcagtttggaaacactctttttgtagaatctgcaagtggacatttggagcgcattgtggtatgcagtagaaaaggaaatgtctccacaaaaaatgtagacagaagcagtcttataaacttctttgtgatgtgtgcattcatgtcacagatttgaacctatctttagattgagcagtttggaaacactctttttgtagaatctgcaagtgcacatgtggagagatttgtggccaatggtagagaagcaaatatcttctcataaactctagacagaagcattctgacaaacttctttgtgatgtgtgcattcatctcacaaagaattgaaactttccttgattcaggagctttgaaacactctttttgtagaatctgcaagtgtacatttggagcactttgaggcctatggtggaaaagggaacatcttcacatacagaacagacagaagcattctgacaaacttcttttcgatgtgtgcgttcaactcacagatttgaaccttacttttcattgagcagatatgaaacactctttttgtagaatctgcaagtggacaattggaccgctttgtggcctatggtggaaaaggatatatcgtcacataaaaactagacagaaatcttctgacaaacttctttgttatgcatgcattcatctttcagagttgaaacttccttttgattgagcaactttgaaacactctttttgtagaatctgcaagtagtcatttgtagcgctttggggactatggcgaaaaaggaaatatcttcacataaaaactagacagaagcattctgacaaacttctttgtgatgtgggcattcatctcacagagttgaaccttacttttcattgagcaattttgaaacactctttttggagaatctgtaagtggacattttgagggctttgacgcacatggtggaaaaggaaatatcttcatatatcttcatataaaaaacagaagcattctgacaaccttcattgtgatatgtgcattcatctcccagagttgaaccttagttttgattgagcagttttgaaacaccctttttgtagtatctgcaagaggacatttcgagtgctttgaggcctatggtggaaaaggaaataccctcatataaaaacgagacagaagcattctgacaaactactttgtgctgtgtgcattcatctcacagagctggacctttcttttgattgagcagctttgaaacactctttttgtagaatctgcaattggacatttggagcactttgaggtctatggtcgaaaagcaaatatcttcacagaaaaactagacagaagtattttgaaaaacttcattgtgacgtttgcattcatctcactgatgtgaacctttcttttgattgagcagttttgaaaaactctttttgtaggatctgcatgtggacatttggatcgctttgaggcctatggaggaaaagaaaatatcttcacctaaaaaccatacagaagtattctgagaaacttctttgtgatgtgtgcattcatctcacagagttgaaccttacttttcattgagcaattttgaaacactctttttgtagaatctgcaagtggacatttggagcacttttagacctatggtggaaaaggaaatatcttcacataaaaactagacagaactattctgagaaacttctttgggatgtgtgctttcatctcacagagtaaaacattcttttgatcgagcagttttgtaagtctctttttgtagaatctgcaagtggacattttgagtcctttcaggcctatggtggaaaaggaaatatctacaaattgaaactcgacagaagaattctgagaaactcctttgtgatgcttgcattcatctaacagacttgaacctttctttatgattgagcagtttggaaaccctctttttgtagaatctgctagcggatatctggagcgttttgcagcctatggtggaaaaggaaatatcttcacataaaaactaaacagatgtattctgagaaacttctatgtgatgtgtgcattcatctcacagagttgaacctttcttttgattgagcagtttggaaacactctttttgtagagtctgcaagtggacgtatggaatgctttgaagcctatggtagaacaggaaatatcttcacataaaatctagacagaggaattctgagagacttctttgtgatgcgtgtactcatcttacagagttaaaccttccttttgaatgagcagatttgaaactgtctttttgtagaatctgcaagtggacattttgagcgccttgaggcctatggtggaaaagaaaatgccttcacatgaaaactagacagaagaattctgagaaacttctttctgatgtgtgcgttaatctcacacagttaaacctttcttttgattgagcagtttcaaaacactctttttgtagaatctgcaagtagacatttggagggctttgtggcctacggtagaaaaggaaatatcatcacataaaatctagacagaagcaatctgagacttctttgtgatgtgtgcattcaccacacattgtttaacctttcccttgattgagcagttttgaaactctttttgtagaatctacaagtctacatttggcgtgctttgaggcctatggtggaaaaggaaatatcttcacataaaaactagtcaaaagaattctgagaaactgcttggtgatgtgtgcgttcaccacacagagctgaaccattgttttgattgagcagtttggaaaccctctttttgtagaatctgcaagtggacaatttgagcaacttgtggcctctggtggaaaatgaaatatctttacataaaaactagactgaataattctgggaaacttctttctgatgtgtgcgttcatctcacagagttaaacttttcattttattgaacagtttggaaacactctttttgtagaatctgcaagtggacatttggagagcattgtggtatgcagtagaaaaggaaatgtctccacaaaaaatgtagacagaagcattctgagaaacttctttgtgacgtgtgcattcatctcacagagttgaacctcccttttgattgagcactttcgaagcactctttctgtaaaatctgcaagtggacaattggagtgctttgaggcctatggtggaaaaggaaatatcttcacttaaaaactagacagaagcattctgacaaacttctttgtgatgtgtgcattcatctcacaaagaattgaaactttccttgattcaggagctttgaaacactctttttgtagaatctgcaagtgtacatttggagcactttgaggcctatggtggaaaagggaacatcttcacatacagaacagacagaagcattctgacaaacttcttttcgatgtgtgcattcaactcacagatttgaaccttacttttcattgagcagatttgaaacactctttttgtagaatctgcaagtggacaattggaccgctttgtggcctatggtggaaaaggatatatcgtcacataaaaactagacagaaatcttctgacaaacttctttgttatgcatgcattcatctttcagagttgaaccttccttttgattgagcaactttgaaacactctttttgtagaatctgcaagtagtcatttgtagcgctttggagactatggcgaaaaaggaaatatcttcccataaaaactagacagaagcattctgacaaacttctttgcgatgtgtgcattcatctcacagagttgaaccttacttttcattgagcaattttgaaacactctttttggagaatctgtaagtggacattttgagggctttgacgcacatggtggaaaaggaaataccttcacataaaaacgagacagaagcattctgacaaactactttgtaatgtgtgcattcatctctcagagctggacctttcttttgattgaacagctttgaaacactctttttgtagaatctgcaagtggacatttggagcgctttgaggcctatggtggaaaaggaaatatcttcacagaaaaactagacagaagcattctgacaaactactttgtgctgtgtgcattcatctcacagagctggacctttcttttgattgagcagctttgaaacactctttttgtagaatctgcaattggacatttggagcactttgaggtctatggtcgaaaagcaaatatcttcacagaaaaactagacagaagcattttgaaaaacttctttgtgacgtttgcattcatctcactgacttgaaactttcttttgattgagctgttttgaaaaactctttttgtaggatctgcaagtggacatttagagtgctttgagggctatggtggaaaagaaaatatcttcacctaaaaaccagacagaagcattatgttaaactttttgtgatgtctgcatacatctcacaaagagttgaaactttcttttgattgagcagctttgcaacattctttttgtggaatctgcaagtggacatttggagtgctttgagacctatggtggataacgaaatatgttcacataaaaattggacagaagcattctgagaaacttctttgtgatgtgtgcattcatctcacagagttgaacctcccttttgattgagcactttggaagcactctttctgtaaaatctgcaagtggacaattggagtgctttgaggcctatggtggaaaaggaaatatcttcacataagaactagacagaagaattctgagaaactcctttgtgatgcttgcatttatctaacagagttgaacctttctttatgattgagcagttcggaaaccctctttttgtagaatctgctagcggatatttggagcgttttgcagcctatggtggaaaaggaaatatcttcacataaaaactaaacaaatgtattctgataaacttctatgtgatgtgtgcgttcatctcacagagttgaacctttcttttgattgagcagtttggaaacactcttttcgtagaatctgcaagtagacgtatggaatgctttgaagcctatggtagaacaggaaatatcttcacataaaatctagacagaggaattctgagagacttctttgtgatgcgtgtactcatcttacagagttaaagcttccttttgaatgagcagatttgaaactgtctttttgtagaatctgcaagtggacattttgagcgccttgaggcctatggtggaaaagaaaatgccttcacatgaaaactagacagaagaattctgagaaacttctttctgatgtgtgcgttaatctcacacagttgaacctttcttttgattgagcagtttcaaaacactctttttgtagaatctgcaagtagacatttggagggctttgtggcctacggtagaaaaggaaatatcatcacataaaatctagacagaagcaatctgagacttctttgtgatgtgtgcattcaccacacattgtttaacctttcccttgattgagcagttttgaaactctttttgtagaatctacaagtctacatttggagtgctttgaggcctatggtggaaaaggaaatatcttcacataaaaactagtcaaaagaattctgagaaacttcttggtgatgtgtgcgttcacctcacagggctgaaccattgttttgattgagcagtttggaaaccctcttttcgtagaatatgcaagtggacatttggagtactttgatgcccctggtcgaaaaggaaatatcttaacttaaaaactagacagaataattctgggaaacttctttctgatgtgtgcgttcatctcacagagttaaacttttcattttattgaacagtttggaaacactctttttgtagaatctgcaagtggacatttggagcgcattgtggtatgcagtagaaaaggaaatgtctccacaaaaaatgtagacagaagcattatgataaactttttgtgatgtctgcatacatctcacaaagtgttgaaactttcttttgattgagcagctttgcaacattctttttgtagaatctgcaagtggacatttggagtgctttgaggcctatggtggaaaacgaaatatcttcacataaaaattggacagaaccattctgagaaacttctttgtgatgtgtgcattcatcttacagggttgaacctcccttttgattgagcactttggaagcactctttttgtaaaatctgcaagtggacaattggagtgctttgaggcctatggtggaaaaggaaatatcttcacttaaaaactagacagaagcattctgacaaacttcttttcaatgtgtgcgttcaactcaaagatttgaaccttacttttcattgagcagatttgaaacactctttttgtagaatctgcaagtggacaattggaccgctttctggcctatggtggaaaaggatgtatcgtcacataaaaactagacagaaatcttctgacaaacttctttgttatgcatgcattcatctttcagagttgaaacttccttttgattgagcaactttgaaacactctttttgtagaatctgcaagtagtcatttgtagcgctttggggactatggcgaaaaaggaaatatcttcacataaaaactagacagaagcattctgacaaacttctttgtgatgtgggcattcatctcacagagttgaaccttacttttcattgagcaattttgaaacactctttttggagaatctgtaagtggacattttgagggctttgacgcacatggtggaaaaggaaatatcttcatatatcttcatataaaaaacagaagcattctgacaaccttcattgtgatatgtgcattcatctcccagagttgaaccttagttttgattgagcagttttgaaacaccctttttgtagtatctgcaagaggacatttagagtgctttgaggcctatggtggaaaaggaaataccctcatataaaaacgagacagaagcattctgacaaactactttgtaaagtgtgcattcatctctcagagctggacctttcttttgattgaacagctttgaaacactctttttgtagaatctgcaagtggacatttggagcgctttgaggcctatggtggaaaaggaaatatcttcacagaaaaactagacagaagcattttgaaaaacttctttgtgacgtttgcattcatctcactgacttgaaactttcttttgattgagctgtttcgaaaaactctttttgtaggatctgcaagtggacatttagagcgctttgaggcctatggtggaaaagaaaatatcttcacctaaaaaccagacagaagcattctgagaaatttctttgtgatgtgtgcaatcatctcacagagttgaaccttacttttgattgtccagttttgaaacactctttttgtagaatctaaaagtggacatttggagcgctttgaggcctatggtggataatgaaatatcttcatataataaatagagagaacaattctgagaaacttctttgggatgtgtgcattcatctcacagagtaaaacattcttttgatccagcagttttgtaagtatctttttgtagaatctgcaagtggacattttgagccctttcaggcctatggtggaaaaggaaatatctacaaattgaaactcggcagaagaattctgagaaactcctttgtgatgcttgcatttatctaacagagttgaacctttctttatgattgagcagttcggaaaccctctttttgtagaatctgctagcggatatttggagcgttttgcagcctatggtggaaaaggaaatatcttcacataaaaactaagcagatgtattctgataaacttctatgtgatgtgtgcgttcatctcacagagttgaacctttcttttgattgagcagtttggaaacactcttttcgtagaatctgcaagtagatgtatggaatgctttgaagcctatggtagaacaggaaatatcttcacataaaatctagacagaggaattctgagagactcctttgtgatgtttgtattcatcttacagaattaaaccttccttttgaatgagcagatttgaaactgtctttttgtagaatctgcaagtggacattttgagcgcctggaggcctatggtggaaaagaaaatggcttcacatgaaaactagacagaagaattctgagaaacttctttcttatgtgtgcgttaatctcacacagttgaacctttcttttgattgagcagtttcaaacactctttttgtagaatctgcaagtggacttttggagcactttgtggcctacggtagaaaaggaaatatcatcacataaaatctagacagaagcaatctgagacttctttgtgatgtgtgcattcaccacacattgtttaacctttcccttgattgagcagttttgaaactctttttgtagaatctacaagtctacatttggagtgctttgaggcctatggtggaaaaggaaatatcttcacataaaaactagtcaaaagaattctgagaaactgcttggtgatgtgtgcgttcaccacacagagctgaaccattgttttgattgagcagtttggaaaccctctttttgtagaatctgcaagtggacaatttgagcaacttgtggcctctggtggaaaatgaaatatctttacataaaaactagactgaataattctgggaaacttctttctgatgtgtgcgttcatctcacagagttaaacttttcattttattgagcagtttggaaacactctttttgtagaatctgcaagtggacatttggagcgcattgtggtatgcagtagaaaaggaaatgtctccacaaaaaatgtagacagannnnnnnnnnnnnnnnnnnnnnnnnnnnnnnnnnnnnnnnnnnnnnnnnnnnnnnnnnnnnnnnnnnnnnnnnnnnnnnnnnnnnnnnnnnnnnnnnnnnagcattctgtgaaacttgtttgtgatgtgtgtactcaactaacagtgttgaacctttctttttacagagcagttttgaaacactctttttgtagaatctgcgaggggatatttggatacatttcaggatttcgttggaaacgggaatatcttcatataaaatctcgacagaagcattctcagaaacttctttgtgatatgtgcattcaagtcacagagttgaatattccctttcacagagtaggtttgaaacactctttttgtagtatctgaaagtggacatttggagcgccttgacacctacggtgaaaagggaaatatcttcccataaaaactagacagaagcaatctcagaatcttctttgggatatatgcacgcagctaacagagttgaacctttctattgacagagcagttttgaaacagtctttctgtggaatctacaagtggatatttggatagcttggaggatttcgttggaaacgggattacgtataaaaagtagacagcaagcattctcataaacttgtttgtgatgtgtgaactcagctaacaggcgtggatctttcttttgatacagcagttttgaaaaacactttttgttgaatctgcaagtggacatttggatagatttgaagatttcgttggaaacgggaatatcttcatatcaaatctagacagaagcattctcagaaacgtctttgtgatgtttgcattcaactcatagagttgaacattccgtttcagagagcaggtttgaagcactctttttgtagtatgtgcaagtggatatttggagcgctctgaggcctacggtgaaaaagcagatatcttcccataaccactagacagaaacattctcagaaactcctttatgacgtatgcacctcacctaacagagaagaaccttccttttgacagagcagttttgatacactctttttgtagaatctgcaagtggatacttggatagctgtgaagatttcgttggaaacgggaatatcttcctataaaatctagacagaagcattctcagaaactgctctgtgatgtctgcattcaagtcacagagttgaacattgcctttcctagagtaggtttgaaacgctctttttgtagtatatggaagtggacgtttcggacggtttgaggcccatggtgataaagggaatatcttcccctacaagctagaaagaagcattctgtgaaacttgtttgtgatgtgtgtactcaactaagagagttgaacctttctttttacagagcagttttgaaacactcattttgtagaatctgcgaggggatatttggatagatttcaggatttcgttggaaacgggaatatctttatataaaatctcgacagaagcattctcagaagcttctttgtgatatgtgcattcaagtcacagagttgaatattccctttcacagagtaggtttgaaacactctttttgtagtatctggaagtggacatttagagcgccttgacgcctacgggtgaaaagggaaatatcttctcataaaaagtagacagaaagcaatctcagaatcttctttgggatatatgcacgcagctaacagagttgaacctttctattgacagagcagttttgaaacagtctttctgtggaatctgcaagtggacatttggatagcttggaggatttcgttggaaacgggattacgtataaaaagtagacagcagcatcctcagaaacttctttgtgatgtgtgcattcaagtcacagagttgaacattccccttcgtacagcagttttgaaacactctttgtgtattatctgggagtgaacattaggacagctttcaggtctatggtgagaaaggaaatatcttcaaataaaaacaagacagaagcattctcataaacttgtttctgatgtgtgaactcagctaacagaggtggatctttcttttgatagagcagttctgaaaaacactttttgttgaatctgcaagtggatatttgcatagatttgaagatttcgttggaaacgggaatatcttcatatcaaatctagacagaagcattctcagaaacgtctttgcgatgtttgcattcaactcatagagttgaacattccgtttcagagagcagctttgaggcactctttttgtagtatgcgcaagtggatatttggagcgctctgaggcctacggtgaaaaagcaaatatcttcccataaccactagacagaaacattctcagaaactcctttatgacgtatgcactcacctaacagaaaagaaccttccttttgacagagcagttttgatacactctttttgtagaatctgcaagtggatatttggatagatgtgaagatttcgttggaaacgggaatatcttcctataaaatctagacagaagcattctcagaaactgctctgtgatgtctgcattcaagtcacggagttgaacattgcctttcctagagcaggtttgaaacgctctttttgtagtatatggaagtggacgtttcggacggttggaggcccatggtgataaagggaatatcttcccctacaagctagaaagaagcattgtgtgaaacttgtttctgatgtttgtactcaactaacagagttgaacctttctttttacagagcagttttgaaacactctttttgtagaatctgcgaggggatatttggatacatttcaggatttcgttggaaacgggaatatcttcatataaaatctcgacagaagcattctcagaaacttctttgtgatatgtgcattcaagtcacagagttgaatattccctttcacagagtaggtttgaaacactctctttgtagtatctggaagtggacatttggagcgccttgacgcctacggtgaaaagggaagtatcttcccataataactagacagaagcaatctcagaatcttctttgggatatatgcacgcagctaacagagttgaacctttctgttgacagagcagatttgaaacagtctttctgtggaatctgcaagtggatatttggatagattggaggatttcgttggaaacgggattacgtataaaaagtagacagcagcatcctcagtaaacttctttgtgatgtgtgcattcaagtcacagagttgaacattccctttcgtacagcagttttgaaacactctttctgtagtatctggaagtgaacattaggacagctttcagctctatggtgagaaaggaaatatcttcaaatataaactagacagaagcattctcataaacttgcttgtgatgtgtgaactcagctaacagaggtgaatctttcttttgatagagcagttctgaaaaacactttttgttgaatctgcaagtggacatttggatagatttgaagatttcgttggaaacgggaatatcttcatatcaaatgctagacagaagcattctcagaaacgtctttgtgatgtttgcattcatctcatagagttgaacattccctttcagagagcagctttgaagcactctttttgtagtatgtgcaaggggatatttggagcgctctgaggcctaaggtgaaaaagcaaatatcttcccataaccactagacagaaacattctcagaaactcctttatgacgtatgcactcacctaacagagaagaaccttccttttgacagagcagttttgatacactccttttgtagaatctgcaagtggatatttggatagctgcgaagatttccttggaaacgggaatatcttcctataaaatctagacagaagcattctcagaaactgctctgtgatgtctgcattcaagtcacagagttgaacattgcctttcatagagcaggtttgaaacgctctttttgtagtatatggaagtggaattatcggacggtttgaggcccatggtgataaagggaatatcttcccctacaagctagaaagaagcattctgtgaaacttgtttgtgatgtgtgtactcaactaagagagttgaacctttcttttcacagggcagttttgaaacactctttttgtagaatctgcgaggggatatttggatagatttcaggatttcgttggaaacgggaatatcttcatacaaaatctcgacagaagcattctcagaaacttccttgtgatatgtgcattcaagtcacagagttgaatattccttttcacagagtaggtttgaaacactctttttgtagtatctggaagtggacatttggagcgccttgacgcctacggtgaaaagggaaatatcttcccataaaaactagacagaagcaatctcagaatcttcgttgggatatatgcacgcagctaacagagttgaacctttctattgacagagcagttttgaaacagtctttctgtggaatctgcaagtggatatttggatagcttggaggatttctttggaaacgggattacgtataaaaagtagacagccagcatcctcagaaacttctttgtgatgtgtgcattcaagtcacagagttgaacattccctttcgtacagcagttttgaaacactctttctgtagtatctggaagtgaacattaggacagctttcaggtctatggtgagaaaggaaatatattcaaataaaaactagacagagaattctgataaacttgtttgtgaagtgtgaactcagctaacacaggtggatctttcttttgatacagcagttttgaaaaacactttgttgaatctgcaagtggacatttgcatagatttgaagatttcgttggaaacgggtatatcttcataacaaatctagacagaagcattctcagaaacgtctttgtgatgtttgcattcaactcatagagttgaacattccctttcagagagcagctttgaaacactctttttgtagtatgtgcaagtggatatttggagcgctctgaggcctacggtgaaaaagcaaatatcttcccataaccactagacagaaaacattctcagaaacttctttatgacgtatgtactcaactagcagagaagaactttccttttgacagagcagttttgatacactctttttgtagaatctgcaagtggatatttggatagttgtgaagatttcgttggaaacgggaatatcttcctataaaatctagacagaagcattctcagaaactgctctgtgatgtctgcattcaagtcacagagttgaacattgcctttcatagaacaggtttgaaacgctctttttgtagtatatggaagtggatgtttcggacggttggaggcccatggtgataaagggaatatcttcccctacaagctagaaagaagcattgtgtggaacttgtttgtgatgtgtgtactcaactaacagagttgaacctttctttttacagagcagttttgaaactctctttttgtagaatctgcgaggggatatttggatagatttcaggatttctttggaaacgggaatatcttcatataaaatctcgacagaagcattctcagaaacttctttgtgatatgtgcattcaagttacagagttgaatattccctttcacagattaggtttgaaacactctttttgtagtatctggaagtggacatttggagcgccttgacgcctacggtgaaaagggaaatatcttcccataaaaactagacagaagcaatctcagaatcttctttgggatatatgtacgcagctaatagagttgaacctttctattgacatagcagttttgaaacagtctttctgtggaatctgcaagtggatatttggatagcttggaggatttcgttggaaacgggattacgtataaaaagtagacagcagaatcctcagaaacttctttgtgatgtgtgcattcaagtcacagagttgaacattccctttcgtacagcagttttgaaacactctttctgtagtatctggaagtgaacactaggagagctttcaggtctatggtgagaaaggaaatatcttcaaataaaaactagacagaagccttctcataaacttgtttgtgatgtctgaactcagctaacagaggtggatctttcttttgatagagcagttctgaaaaacactttttgttgaatctgcaagtggacatttggatagatttgaagatttcgttggaaacgggaatatcttcatatcaaatctagacagaagcattctcagaaacgtctttgtgatgtttgcattcaactcatagagttgaacattccgtttcagagagcagatttgaggcactctttttgtagtatgtgcaagtggatatttggagcgctctgaggcctacggggaaaaagcaaatatcttcccataaccactagacagaaacattctcagaaactcctttatgacggtatgcactcacctaacagagaagaaccttccttttgacagagcagttttgatacactctttttgtagaatctgcaagtggatatttggatagctgtaaagatttcgttggaaacgggaatatcttcctataaaatctagacagaaggattctcagaaactgctctgtgatgtctgcattcaagtcacagagttgaacattgcctttcatagagcaggtttcaagcactctttttttagtatatggaagtggacgtttcggacggtttgaggcccatggtgataaaggaaatatcttcccctacaagctagaaagaagcattctgtgaaacttgtttgtgatgtgtgtactccactaacagagttgaacctttctttttgcagagcagttttgaaacactctttttgtagaatctgcgaggggatatttggatagatttcaggatttcgttggaaaggggaatatcttcatataaaatctcgacagaagcattctcagaaacttccttgtgatatgtgcattcaagtcacagagttgaatattccctttcacagagtaggtttgaaacactctttttgtagtatctggaagtggacatttggagcgccttgacgcctacggtgaaaagggtaatatcttcccataaaaactagacagaagcaatctcagaatcttctttgggatatatgtacgcagctaacagagttgaacctttctattgacagacccgttttgaaacagtctttctgtggaatctgcaagtggatatttggatagcttagaggatttctttggaaacgggattacgtataaaaagtagacagcagcatcctcagaaacttctttgtgacgtgtgcattcaagtcacagagttgaacattccctttcgtacagcagttttgaaacactctttctgtagtatctggaagtgaacattaggacagctttcaggtctatggtgagaaaggaaatatcttcaaataaaaactagacagaagcattctcataaacttgtttgtgatgtgtgaactcagccaacagaggtggatctttcttttgatagagcagttctgaaaaacactttttgttgaatctgcaagtggacatttggatagatttgaagatttcgttggtaacgggaatatcttcatatcaaatcctagacagaagcattcgcagaaacgtctttgtgatgtttgcattcaactcatagagttgaacattccgtttcagagagcagctttgaggcactctttttgtagtatgtgcaagtggatatttggagcgctctgaggcctacggtgaaaaagcaaatatcttcccataaccactagacagaaacattctcagaaactcctttatgacgtatgcactcacctaacagagaaaaaccttccttttgacagagcagttttgatacactctttttgtagaatctgcaagtggatatttggatagctgggaagatttcgttggaaacgggaatatcttcctataaaatctagacagaagcattctcagaaactgctctgtgatgtctgcattcaagtcacagagttgacgattgcctttcatagagcaggtttaaaacgctctttttgtagtatatggaagtggacgtttcggacggtttgaggcccatggtgataaaggaaatatcttcccctacaagctagaaagaagcattctgtgaaacttgtttgtgatgtgtgtactcaactaacagagttgaacctttctttttacagagcagttttgaaacactctttttgtagaatctgcgatgggatatttggatacatttcagcatttcgttggaaacaggaatatcttcatataaaatctcgacagaagcattttcagaaacttctttgtgatatgtgcattcaagtcacagagttgaatattccctttcacagagtaggtttgaaacactctttttgtagtatctggaagtggacatttggagcgccttgacacctacggtgaaaagggaaatatcttcccataaaaactagacagaagcaatctcagaatcttctttgggatatatgcacgcagctaacagagttgaacgtttctattgacagagcagttttgaaagagtctttctgtggaatctgcaagtggatatttggatagcttggaggatttcgttggaaacgggattacgtataataagtagacagcagcatcctcagaaacttccttgtgatgtctgcattcaagtcacagagttgaacattccctttcgtacagcagttttgaaacactctttctgtagtatctggaagtgaacattaggacagctttcaggtctatggtgagaaaggaaatatcttcaaataaaaactagacagaagcattctcataaacttgttttgatgtgtgaactcaactaacagaggtgcttctttctttttatacagcacttttgaaaaacactttttgttgaatctgcaagtggacatttggatagatttgaagatttctttggaaacgggaatatcttcatatcaaatctagacagaagcattctcagaaacgtctttgtgatgtttgcattcaactcatagagttgaacattccgtttcagagagcagctttgaagcactctttttgtagtatgtgcaactggatatttggagagctctgacgcctacggtgaaaaagcaaatatcttcccataaccactagacagaaacattctcagaaactcctttatgacgtatgcactcaactaatagagaagaaccttccttttgacagagtagttttgatacactctttttgtagaatctgcaagtggatatttggacagctgtgaagatttcgttggaaacgggaatatcttcctataaaatctagacagaagcattctcagaaactgctctgtgatgtctgcattcaagtcacggagttgaacattgcctttcatagagcaggtttgaaacgctctttttgtagtatatggaagtggacgtttcggacggtttgaggcccatggtgataaagggaatatctttccctacaagctagaaagaagcattctgtgaaacttgtttgtgatgtgtgtactcaactaacagagttgaacctttctttttacagagcagttttgaaacactgtttttgtagaatctgcgaggggatatttggatagatttcaggatttcgttggaaaggggaatatcttcatataaaatctcgacagaagcattctcagaatcttctttgtgatatctgcattcaagtcacagagttgaatattcccttccacagagtaggtttgaaacactctttttgtagtatctggaagtggacatttggagcgccttgacgcctacggtgaaaagggaaatatcttcccataaaaactagacagaagcaatctcagaatcttctttgggatatatgcacgtagctagcagagttgaacctttctattgacagagcagttttgaaacagtctttctgtggaatctgcaagtggatatttggatagcttggaggatttcgttggaaacgtgattacgtataaaaagtagacagcagcatcctcaggaacttctttgtgatgtgtgcattcaagtcacagagttgaacattccctttcgtacagcagttttgaaacactctttctgtagtatctggaagtgaacattaggacagctttcaggtctatggtgagaaaggaaatatcttcaaataaaaactagacagaagcattctcataaacttgtttgtgatgtgtgaactcagctaacacacgtggatctttcttttgatagagcagttctgaaaatcacttttgttgaatctgcaagtggacatttggatagatttgaagatttcgttggaaacgggaatatcttcatatcaaatctagacagaagcattctcagaaacgtctttgtgatgtttgcattcaacccatagagttgaacattccgtttcagagagcagctttgaagcactctttttgtagtgtgtgcaaggggatattttgagcgctctgaggcctaaggtgaaaaagcaaatatcttcccataaccactagacagaaacattctcagaaactcctttatgacgtatgtactcaactaacagagaagaaccttccttttgacagagcagttttgatacactctttttgtataatctgcaagtggatatttggatagctgtgaagatttcgttggaaacgggaatatcttcctataaaatctagacagaagcattctcagaaactgctctgtgatgtctgtattcaagtcacagagttgaacattgcctttcatagagcaggtttgaaacgctctttttgtagtatatggaagtggatgtttcggacggttggaggcccatgctgataaagggaatatcttcccctacaagctagaaagaaacattctgtgaaacttgtttgtgatgtgtgtactcagctaacagagttgaacctttctttttacagagcagttttgaaacactctttttgtagaatctgcgaggggatatttggatagatttcaggatttcgttggaaaagggaatatcttcatataaaatctcgacagaagaccgaagcattctcagaaacttcattgtgatatctgcattgaagtcacagacttgaatactccctttcacagagtaggtttgaaacactctttttgtagtatctggaattggacatttggatcgctttgacgcctattgtgaaaaaggaaatatcttcccctaaaaactagacagaagcaacctcagaatgttctttgggatgtatgcacgcagctaacagagttgaacctttgtattgacagagcggttttgaaacactctttttgtggaatctgcaagtggatatttggatagcttggaggatttcgttggaaacgggattacgtataaaaagtagacagcagcatcctcagaaacttctttgtgatgtgtgcattcaagtcacatagttgaacattccctttcgtacagcagttttgaaacactctttctgtagtatctggaagtgaacattaggacagctttcagctctatggtgagaaaggaaatatcttcaaataaaaactagacagataagcattctcataaacttgtttgtgatgtgtgaactcagctaacagaggtggatctttcttttgatagagcagttctgaaaaacactttttgttgaatctgcaagtggagatttggatagatttgaagatttcgttggaaacgggaatatcttcatatcaaatctagacagaagcattctcggaaacgtctttgtcatgtttgcattcaactcatagagttgaacattccgtttcagagagcagctttgaagcactctttttgtagtatgttcaaggggatatttggagcgctctgaggcctaaggtgaaaaagcaaatatcttcccataaccactaaacagaaacattctcagaaactcctttatgacgtatgcactcacctaacagagaagaaccttccttttgacagagcagttttgatacactctttttgtagaatatgcaagtggatatttggatagctgtgaagatttcgttggaaacgggaatatcttcctataaaatctacacagaagcattctcagaaactgctctgtgatgtctgcattcaagtcacagagttgaacattgcctttcatagagcaggtttgaaacgctctttttgtagtatatggaagtggatgtttcagacggttggaggcccatggtgataaagggaatatcttcccctacaagctagaaagaagcattctgtgaaacttgtttgtgatgtgtgtactcaactaacagagttgaacctttcttttacagagcagttttgaaacactctttttgtagaatctgcgaggggtatttggatagatttcaagatttcgttgggaacgggaatatcttcatataaaatctcgacagaagcattctcagaaacttctttgtgatatcggcattcaagtcacagagttgaatattccctttcacagagtaagtttgaaacaatctttttgtagtatctggaagtggacatttggatcgccttgacgcctacggtgaaaagggaaatatcttcccataaaaactagacagaagcaatctcagaatcttctttgggatatatgcacgcacctaacagagttgaacctttctattgacagagcagttttgaaacagtctttctgtggaatctgcaggtggatatttggatagcttggaggatttcgttggaaacgggattacgtataaaaagtagacagcagcatcctcagaaacttctttgtgatgtgtgcattcaagtcacagagttgaacattccctttcgtacagcagttttgaaacactctttctgtagcatctggaagtgaacattagttcagctttcaggtctatggtgagaaaggaaatatcttcaaataaaaactagacagaagcattctcataaacttgtttgtgatgtctgaactcagctaacagaggtggacctttcttttgatagagcagttctgaaaaacactttttgttgaatctgcaagtggacatttggatagatttgaagatttcgttggaaacgggaatatcttcatatcaaatctagacagaagaattctcggaaacgtctttgtgatgtttgcattcaactcatagagttgaacattccctttcagagaacagctttgaagcactctttttgtagtatgtgcaaggggatatttggagcgctctgaggcctaaggtgaaaaagcaaatatcttcccataaccactagacagaaaacattctcagaaacttctttatgacgtatgtactcaattagcagagaagaactttccttttgacagagcatttttgatacactctttttgtagtatctgcaagtggatatttggatagctgtgaagatttcgttggaatcgggaatatcttcctataaagtccggacagaagcattctcagaaactgatctgtgatgtctgcattcaagtcacagagttgaacattgcctttcatagagcaggtttgaaacgctctttttgtagtatatggaagtagacgtttcggacggtttgaggcccatggtgataaagggaatatcttcccctacaagctagaaagaagcattctgtgaaacttttttgtgatgtgtgtactcaactaacagagttgaacctttctttttacagagcagttttgaaacactctttttgtagaatctgcgaggggatatttggatagttttcaggatttcgttggaaacgggaatatcttcatataaaatctcgacagaagcattctcagaaacttcattgtgatatctgcattcaagtcacagagttgaatattccctttcacagagtaggtttgaaacactctttttgtagtatctggaagtggacatttggagcgccttgacacctacggtgaaaagggaaatatcttcacataaaaactagacagaatcaatctcagaatcttctttgggatatatgcaggcagctaacagagttgaacctttctattgacagagcagttttgaaacagtctttctgtggaatctgcaagtggatatttggatagattggaggatttcgctggaaacgggattacgtataaaaagtagacagcagcatcctcagaaacttctttgtgatgtgtgcattcaagtcacagagttgaacattccctttcgtacagcagttttgaaacactctttctgtagtatctggaagtgaacattaggacagctttcaggtctatggtgagaaagggaatatcttcaaataaaaactagacagaagcattctcataaacttgtttgtgatgtgtgaactcagctaacagaggtggatctttcttttcatagagcagttctgaaaaacactttttgttgaatctgcaactggacatttggatagatttgaagatttcgttggaaacgggaatatcttcatatcaaatctagacagaagcattctcagaaacgtctttgtgatgtttgcattcaactcatagagttgaacattccgtttcagagagcaggtttgaagcactctttttgtagtatgtgcaagtggatatttggagcgctctgaggcctacggtgaaaaacaaatatcttcccataaccactagacagaaacattctcagaaactcctttatgacgtatgtactcaactaacagagaagaaccttccttttgaaagagcagttttgatacactctttttgtagaatctgcaagtggatatttggatagctgtgaagatttcgatggaaacgggaatatcttcctataaaatctagacagaataattctcagaaagtgctctgtgatgtctgcattcaagtcacagagttgaacattgcctttcatagagcaggtttgaaacactctttttgtagtatatggaagtggacgtttcggacggtttgaggcccatggtgataaagggaatatcttcccctacaagctagaaagaagcattctgtgaaacttgtttgtgatgtgtgtactcaactaacacagttgaacctttctttttacagagcagttttgaaacactctttttgtagaatctgcgaggggatatttggatacatttcaggatttcgttggaaacgggaatatcttcatataaaatctcgacagaagcattctcagaaacttctttgtgatatctgcctttaagtcacagagttgaatattccctttcacagaataggtttgaaacactctttttgtagtatctggaagtggacatttggagcgccttgacacctacggtgaaaagggaaatatcttcccataaaaactagacagaagcaatctcagaatcttctttgggatatatgcacgcagctaacagagttgaacctttctagtgacagagcagttttgaaacagtctttctgtggtatctgcaagtggatatttggatagattggaggatttcgttggaaacgggattacgtataaaaagtagacagcagcatcctcagaaacatccttgtgatgtgtgcattcaagtcacagagttgaacattccctttcgtacagcagttttgaaacactctttctgtagtatctggaagcgaactttaggacagctttcaggtctatagtgagaaaggatatatcttcaaataaaaactagacagaagcattctcataaacttgtttgtgatgtgtgaactcagctaacagaggtggatctttcttttgatagagcagttctgaaaaacactttttgttgaatctgcaagtggacatttagggatagatttgaagatttcgttggaaacgggaatatcttcatatcaaatctagacagaagcattctcagaaacgtctttgtgatgtttgcattcaactcatagagttgaacattccgtttcagagaccagctttgaagcactctttttgtagtatgtgcaagtggatatttggagcgctctgaggcctacggtgaaaaagcacatatcttcccataaccactagacagaaacattctcagaaacttctttatgacgtatgtactcaactagcagagaagaactttccttttgacagagcatttttgatacactctttttgtagtatctgcaagtggatatttggatagctgtgaagatttcgttggaatcgggaatatcttcctataaagtccggacagaagcattctcagaaactgctctttgatgtttgcattcaagtcacagagttgaacattgcctttcatagagcaggtttcaagcactctttttttagtatatggaagtggacgtttcggacggtttgaggcccatggtgataaaggaaatatcttcccctacaagctagaaagaagcattctgcgaaacttgtttgtgatgtgtgtactcaactaacagagttgaacctttctttttacagagcagttttgaaacactctttttgtagaatctgcgaggggatatttggatagatttcaggatttcgttggaaacgggaatatcttcatataaaatctcgacagaagcattctgagaaacctctttgtgatacctgcattcaagtcacagggttgaatattccctttcacagagtatttttgaaacactctttttgtagtatttggaagtggacatttggagcgccttgacacctacggtgaaaaaggaaatatgaaatatcttcccataaaaactagacagaagcaatctcagaatcttctttgggatatatgtacgcagctaatagagttgaacctttctattgacagagcagttttgaaacagtctttctgtggaatctgcaagtggatatttggatagcttggaggatttcattggaaacgggattacgtataaaaagtagacagcagcatcctcagaaacttctttgtgatgtgtgcattcaagtcacagagttgaacattccctttcgtacagcagttttgaaacactctttctgtagtatctggaagtgaacattaggacagctttcagctctatgatgagaaaggaaatatcttcaaataaaaactagacagaagcattctcataaacttgtttgtgatgtgtgaactcagctaacacacgtggatctttcttttgatagagcagttctgaaaaacactttttgttgaatctgcaagtggacatttggatagatttgaagatttcgttggaaacgggaatatcttcatatcaaatctagagagaagcattctcagaaacgtctttgtgatgtttgcattcaactcatagaattgaacattgcggttcagagagcagctttgaagcactctttttgtagtatgtgcaagtggatatttggagcgctctgaggcctacggtgaaaaagcaaatatcttcccataaccactagacagaaacactctcagaaactcctttatgacgtatgtactcaactaacagagaagaactttccttttgacagagcatttttgatacactctttttgtactatctgcaagtggatatttggatagctgtgaagatttcgttggaaacgggaatatcttcctataaaacctagacagaagcattctcagaaactgctctgtgatgtctgcattcaagtcacagagttgaacattgcctttcatagagcaggtttcaaacactctttttttagtatatggaagtggacgtttcggacggtttgaggcccatggtgataaaggaaatatcttctcctacaagctagaaagaagcattctgtgaaacttgtttgtgatgtgtgtactcaactaacagagttgaacctttctttttacagagcagttttgaaacactctttttgtagaatctgtgaggggatatttggatacatttcagcatttcgttggaaacgggaatatcttcatatataatctcgacagaagcattctcagaaacttcattgtgatatctgcattcaagtcacagagttgaatattcgctttcacagagtaggtttgaaacactctttttgtagtatctggaagtggacatttggagcgccttgacacctacggtgaaaagggaaatatcttcccataaaaactagacagaagcaatctcagaatcttctttgggatatatgcacgcagctaacagagttgaacctttctattgacagagcagtcttgaaacagtctttctgtggaatctgcaagtggatatttggatagcttggaggatttcgttggaaacgggattaagtataaaaagtagacagcagcatcctcagaaacttctttgtgatgtgtgcattcaagtcacagtgttgaacattccctttcgtacagcagttttgaaacactctttctgtagtatctggaagtgaacattaggacagctttcaggtctatggtgagaaaggaaatatcttcaagtaaaaactagacagaagcattctcataaacttgtttgtgatgtgtgaactcagctaacagaggtggaactttcttttgatagagcagttctgaaaaacactttttgttgaatctgcaagtggacatttggatagatttgaagatttcgttggaaacgggaatatcttcatatcaaatctagacaaaagcattctcagaaacgtctttgtgatgtttgcattcaactcatagagttgaacattccgtttcagagagcagctttgaagcactctttttgtaatatctgcaagtggatatttggagcgctctgaggcctacggtgaaaaagcaaatatcttcccataaccgctagacagaaacattctcagaaactgctttatgacgtatgcactcaactaacagagaagaaccttccttttgacagagcagttttgatacactctttttgtagaatctgcaagtggatatttggatagctgtgaagatttctttggaaacgggaatatcttcctataaaatctagacagaagcattctcagaaactgctctgtgatgtctgcattcaagtcacagagttgaacattgcctttcctagagcagctttgaaaagctctttttgtagtatatggaagtggacgtttcggatggtttgaggcccatggtgataaagggaatatcttcccctacaagctagaaagaagcattctgtgaaacttgtttgtgatgtgtgtactcaactaacagagttgaacctttctttttacagagcagttttgaaacactctttttgtagaatctgcgaggggatatttgatagatttcaggatttcgttggaaacgggaatatcttcatataaaatctcgacagaagcattttcagaaacttcttcgtgatatctgcattcaagtcacagagttcaatattcccttccatagagaaggtttgaaacactctttttgtagtatctggaagtggacatttggagcgccttgacacctacggtgaaaagggaaatatcttcccataaaaactagacagaggcaatctcagaatcttctttgggatatatgcacgcagctaacagagttgaacctttctattgacagagcagttttgaaacagtctttctgtggaatctgcaagtggatatttggatagcttggaggatttcgttggaaatgggattacgtataaaaagtagacagcagcatcctcagaaacttctttgtgatgtgtgcattcaagtcacagagttgaacattccctttcgtacagcagttttgaaacactctttctgtagtatctggaagtgaacattaggacagctttcaggtctatggtgagaaaggaaatatcttcaaataaacactagacagaagcattctcataaacttgtttgtgatgtgtgaactcagctaacacacgtggatctttcttttgatagagcagttctgaaaaacactttttgttgaatctgcaagtggacatttggatagatttgaagatgtcgttggaaacgggaatatcttcatatcaaatctagacagaagcattctcagaaacgtctttgtgatgtttgcattcaactcatagagttgaacattccgtttcagagaccagctttgaagcactctttttgtagtatgtgcaagtggatatttggagcgctctgaggcctacggtgaaaaagcaaatatcttcccataaccactagacagaaacattctcagaaactcctttatgacgtatgcactcacctaacagagaagaaccttccttttgacagagcagttttgaaacactctttttgtagaatctgcaagtggatatttggatagctgtgaagatttcgttggaaacgggaatatcttcctataaaatctatacagaagcattctcagaaacagctctgtgatgtctgcattcaagtcacagtgttgaacattgcctttcatagagcaggtttgaaacgctctttttgaagtatatggaagtggacgtttcggacggtttgaggcccatggtgataaagggaatatcttcccctacaagctagaaagaagcattctgtgaaacttgtttgtgatgtgtgtactcaactaacagagttgaacctttctttttacagagcagttttgaaacactctttttgtagaatctgcgaggggatatttggatacatttcaggatttcgttggaaacgggaatatcttcatataaaatctcgaccgaagcattctcagaaacttctttgtgatatctgcattcaagtcacagggttgaatattccctttcacagagtaggtttgaaacactctttttgtagtatctggaagtggacatttggagcgccttgacacctacggtgaaaagggaaatatcttcccataaaaactagacagaagcaatctcagaatctactttgggatatatgcacgcagctaacagagttgaacctttgtattgacagagcagttttgaaacagtctttctgtggaatctgcaagtggatatttggatagcttggaggatttcgttggaaacgggattacgtataaaaagtagacagcagcatcctcagaaacttctttgtgttgtgtgcattcaagtcacagagttgaacattccctttcgtacagcagttttgaaaaactctttctgtagtatctggaagtgaacattaggacagctttcacgtctatggtgagaaaggaaatatcttcaaataaaaactagacagatagcattctcataaacttgtttgtgatgtgtgaactcagctaacacaggtggatctttcttttgattgagcagttctgaaaaacactttttgttgaatctgcaagtggacatttggatagatttgaagatttcgttggaaacgggaatatcttcatatcaaatctagacagaagcattctcagaaacgtctttgtgatgtttgcattcaactcatagagttgaacattccgtttcagagaccagctttgaagcactctttttgtagtatgtgcaagtggatatttggagcgctctgaggcctacggtaaaaagcaaatatcttcccataaccactagacagaaacattctcagaaactcctttacgacgtatgcactcacctaagagagaagaaccttccttttgacagagcagttttgatacactctttttgtagaatctgcaagtggatatttggatagctgtgaagatttcgttggaaacgggaataacttcctataaaatctagacagaagcattctcagaaactgttctgtgatgtctgcattcaagtcacagagttgaacattgcctttcatagagcaggtttgaaacgctctttttgtagtatatggaagtggacgtttcggacggtttgaggcccatggtgataaagggaatatcttcccctacgagctagaaagaagcattctgtgaaacttgtttgtgatgtgtgtactcaactaacagagttgaacctttctttttacagagcagttttgaaacactctttttgtagaatctgcgtggggatatttggatacatttcagcatttcgttggaaacgggaatatcttcatataaaatctcgacagaagcattctcagaaacttctttgtgatatgtgcattcaagtcacagagttgaatattccctttcaccgagtaggtttgaaaaactctttttgtagtatctggaagtggacatttggagcgccttgacgcctacggtaaaaagggaaatatcttcccataaaaactagacagaagcaatctcagaatcttctttgggatatatgcacgcagctaacagagttgaacctttctattgacatagcagttttgaaacagtctttctgtggaatctgcaagtggatatttggatagcttggaggatttccttggaaacgggattacgtataaaaagtagacagcagcatcctcagcaaacttctttgtgatgtgtgcattcaagtcacagtagttgaacattccctttcgtacagcagttttgaaacactctttctgtagtatctggaagtgaacattaggacagctttcaggtctatggtgagaaaggtaatatcttcaaataaaaactagacagaaagcattctcataaacttgtttgtgatgtgtgaactcatctaacagaggtggatctttcttttgatagagcagttctgaaaaacactttttgttgaatctgcaagtggacatttggatagatttgaagatttcgttggaaacgggaatatcttcatatcaaatctagacagaagcattcccagaaacgtctttgtgatgtttgcattcaactcatagagttgaacattccctttgagagagcagctttatagcactctttttgtagtatgtgcaaggggatatttagagcgctctgaggcctaaggtgaaaaagcaaatatcttcccataaccactagacagaaacattctcagaaactcctttatgacgtgtgcactcacctaacagagaagaaccttccttttgaaagagcagttttgatccactctttttgtagaatctgcaagtggatatttggatagctgtgaagatttcgttggaaacgggaatatcttcctataaaatctagacagaagcattctcagaaactgctctgtgatgtctgcattcaagtcacagagttgaacattgactttcatagagcaggtttgaaacgctctttttgtagtatatggaagtggatgtttcggacggttggaggcccatggtgataaagggaatatcttcccctacaagctagaaagataagcattctgtgaaacttgtttgtgatgtgtgtactcaactaacagagttgaacctttctttttacagagcagttttgaaacactctttttgtagaatctgcgaggggatatttggatagatttcaggatttcgttggaaacgggaatatcttcatataaaatctcgacagaagcattctcagaagcttctttgtgatatgtgcattcaagtcacagagttgaatattccctttcacagagtaagtttgaaacactctttttgtagtatctggaagtggacatttggagcaccttgacgcctacggtgaaaagggaaatatcttctcataaaaagtagacagaagcaatctcagaatcttctttgggatatatgcacgcagctaacagagttgaacctttctattgacagagcagttttgaaacagtctttctgtggaatctgcaagtggatatttggatagcttgggggatttcgttggaaacgggattacgtataaaaagtagacagcagcatcctcagaaacatccttgtgatgtgtgcattcaagtcacagagttgaacattccctttcgtacagcagttttgaaacactctttctgtagtatctggaagtgaattttaggagagctttcaggtctatagtgagaaaggatatatcttcaaataaaaactagacagaatcattctcataaacttgtttgtgatgtgtgaactcagctaacagacgtggatctttcttttgatacagcagttttgaaaaacactttttgttgaatctgcaagtggacatttggatagatatgaagatttcgttggaaacgggaatatcttcatatcaaatctagacagaagcattcccagaaacgtctttgtgatgtttgcattcaactcatagagttgaacattctctttcagagagcagctttgaagcactctttttgtagtatttgcaaggggatatttggagcgctctgaggcctaaggtgaaaaagcaaatatcttcccataaccactagacagaaacattctcagaaactcctttatgacgtatgcactcagctaacagaaaagaaccttccttttgacagagcagttttgatacactctttttgtagaatctgcaagtggatatttggatagctgtgaagatttcgttggaaacgggaatatcttcctataaaatctagacagaagcattctcagaaactgccctgtgatgtctgcattcaagtcacagagtagaacattgcctttcatagaggaggtttcaaacactctttttttagtatatggaaggggacgattcggacagtttgaggcccatggtgatataggaaatatcttcccctacaagctagagagaagcattctgtgaaacttgtttgtgatgtgtgtactcaactaacagagttgaacctttctttttacagaggagttttgaaacactctttttgtagaatctgcgaggggttatttggatagaattcatgatttcgttggaaaagggaatatcttcctataaaatctcgacagaagcattctcagaaacttctttgtgatatgtgcattcaagtcacagagttgaatattccctttcacagagtaggtttgaaacactctttttgtagtatctggaagtggacatttggagcgccttgacacctacggtgaaaagggaaatatcttcccataaaaattcgacagaagcaatctcagaatcttctttgggatatatgcacgcagctaacagagttgaacctttctattgacagagcagttttgaaacagcctttctgtggaatctgcaagtggatatttggatagcttggaggacttcgttggaaacgggattacgtataaaaagtagacagcagcatcctcagaaacttctttgtgatgtgtgtattcaagtcacagagttgaacattccctttcgtacagcagttttgaaacactctttctgtagtaactggaagtgaacattaggacagctttcaggtctatggtgagaaaggaaatatcttcaaataaaaactagacagaagcattctcataaacttgtttgtgatgtgtgaactcagctaacagacgtggatctttcttttgatacagcagttttgaaaaacactttttgatgaatctgcaagtggacatttggatagatttgaagatttcgttggaaacgggaatatcttcatatcaaatactagacagaagcattctcagaaacgtctttgcgatgtttgcattcaactcatagagttgaacattccgtttcagagagcagctttgaggcactctttttgtagtatgtgcaagtggatatttggagcgctctgaggcctacggtgaaaaagcaaatatcttcccaaaaccactagacagaaacattctcagaaactcctttatgacgtatgcactcacctaacagaaaagaaccttccttttgacagagcagttttgatacactctttttgtagaatctgcaagtggatatttggatagctgtgaagatttcgttggaaacgggaatatcttcctataaaacctagacagaagcattctcagaaactgctctgtgatgtctgcattcaagtcacagagttgaacattgcttttcatagagcaggtttgaaacgctctttttgtagtatatggaagtagacttttcggacggtttgaggcccatggtgataaagggaatatcttcccctacaagctagaaagaagcaatctgtgaaacctgtttgtgatgtgtgtactcaactaacagagttgaacctttctttttacagagcagttttgaaacactctttttgtagaatctgcgaggggatatttggatagatttcaggatttcgttggaaacgggaatatcttcatataaaatctcgacagaagcattctcagaaacttccttgtgatatgtgcattcacgtcacagagttgaatattccctttcacagagtaggtttgaaacactctttttgtagtatctggaagtggacatttggagcgccttgacacctacggtgaaaagggaaatatcttcccataaaaactagacagaagcaatctcagaatcttctttgggatatatgcacgcagctaacagcagttgaacctttctattgacagagcagttttgaaacagtctttctgtggaatctgcaagtggatatttggatagcttggaggatttcgttggaaacgggattaagtataaaaagtagacagcagcatcctcagaaacttcattgtgatgtgtgcattcaagtcacagagttgaacattccctttcgtacagcagttttgaaacactctttctgtagtaactggaagtgaacattaggacagctttcaggtctatggtgagaaaggaaatatcttcaaataaaaactagacagaagcattctcataaacttgtttgtgatgtgtcaactcagctaacagaggtggatctttcttttgatagagcagttcggaaaaacactttttgttgaatctccaagtggacatttggatagatttgaagatttcgttggaaacgggaatatctttatatcaaatctagacagaagcattctcagaaacgtctttgtgatgtttgcattcaactcatagagttgaacattccgtttcagagagcaggtttgaagcactcttcttgtagtatgtgcaagtggatatttggagcgctctgaggcctacggtgaaaaagcaaatatcttcccataaccactagacagaaacattctcagaaactcctttatgacgtatgcactcacctaacagaaaagaaccttccttttgacagagcagttttgatacactctttttgtagaatctgcaagtggatatttggatagttgtgaaggtttcgttggaaacgggaatatcttcctataaaatctagacagaagcattctcagaaactgctctgtgatgtctgcattcaagtaacagagttgaacattgcctttcctagagcaggtttgaaacgctctttttgtagtatatggaagtggacgtttcggacggtttgaggaccatggtgataaagggaatatcttcccctacaagctagaaagaagcattgtgtgaaacttgtttgtgatgtgtgtactcaactaacagagttgaacctttctttttacagagcagttttgaaacactctttttgtagaatctgcgaggggatatttggatacatttctgcatttcgttggaaacgggaatatcttcatataaaatctcgacagaagcattctcagaaactttccttgtgatatgtgcattcaagtcacagagttgaatattccctttcacagagtaggtttgaaacactctttttgtagtatctggaagtggacatttggagcgccttgacacctacggtgaaaaggcaaatatcttcccataaaaactagacagaagcaatctcagaatcttctttgggatatatgcacacagctaacagagttgaacctttctattgacagagcagttttgaaacagtctttctgtggaatctgcaagtggatatttggatagattggaggatttcattggaaacgggattacgtataaaaagtagacagcagcatcctcagaaacttctttgtgatgtgtgcattcaagtcacagagttgaacataccctttcgtacagcagttttgaaacactctttctgtagcatctggaagtgaacattaggacagctttcagctctatggtgagaaaggaaatatcttcaaataaaaactagacagaagcattctcataaacttgtttgtgatgtgtgaactcagctaatagacgtggatctttcttttgatagagcagttctgaaaaacacgttttgttgaatctgcaagtggacatttggatagatttgaagatttcattggaaacgggaatatcgtcatatcaaatctagacagaagcattctcagaaacgtctttgtgatgtttgcattgaactcatagagttgaacattccctttcagagagcagctttgaagcactctttttgtagtatgttcaagtggacatttggaacgctctgaggcctacggggaaaaagcaaatatcttcccataacaactagacagaaacattctcagaaacttctttatgacgtatgtactcaactagcagaaaagaactttccttttgacagagcttttttgatacactctttttgtagtatctgcaagtggatatttggatagctgtgaagatttcgttggaatcgggaatatcttcctataaagtctggacagaagcattctcagaaactgctctgtgatgtctgtattcaagtcacagagttgaacattgcctttcatagagcaggtttgaaacgctctttttgtagtatatggaagtggacttttcggacggtttgaggcccatggtgataaagggaatatcttcccctacaagctagaaagaagcattctgtgaaacttgtttgtgatgtctgtactcaactaacagagttgaacctttcttttcacagagcagttttgaaacactctttttgtagaatctgcgaggggatatttggatagatttcaggatttcgttggaaacgggaatatcttcatacaaaatctcgacagaagcattctcagaaacttctttgtgatatctccattcaagtcacagagttgaatattccctttcacagagtaggtttgaaacactctttttgtagtatctggaagtggagatttggagcgccttgacgcctacggtgaaaagggaaatatcttcccataaaaactagacagaagcaatctcagaatcttctttgggatatatgcacgcagctaacagagttgaacctttctattgacagagcagttttgaaacagtctttctgtggaatctgaaagtggatatttggatagcttggaggatttcgttggaaacgggattaagtataaaaagtagacagcagcatcctcagaaacttctttgtgatgtgtgcattcaagtcacagagttgaacattccctttcgtacagcagttttgaaacactctttctgtagtatctggaagtgaacattaggacagctttcaggtctatggcgagaaaggaaatatcttcaaataaaaactagacagaaagcattctcataaacttgtttgtgatgtgtcaactcagctaacagaggtggatctttcttttgatagagcagttcggaaaaacactttttgttgaatctccaagtggacatttggatagatttgaagatttcgttggaaacgggaatatctttatatcaaatctagacagaagcattctcagaaacgtctttgtgatgtttgcattcaactcatagaattgaacattccctttcagagagcagctttgaagcactctttttgtagtatgtgcaaggggatattttgagcgctctgaggcctaaggtgaaaaagcaaatatcttcccataaccactagacacaaacattctcagaaacgcctttatgacgtatgcactcacctaacagaaaagaaccttccttttgacagagcagttttgatacactctttttgtagaatctgcaagtggatatttggatagctgtgaagatttcgttggaaacgggaatatcttcctataaaatctagacagaagcattctcagaaactgctctgtggtgtttgcattcaagtcacagagttgaacattggctttcatagagcagctttcaaacactctttttttagtatatggaagtggacgtttcggacggtttgaggacaatggtgataaaggaaatatcttcccctacaagctagaaagaaggattctgtgaaacttgtttgtgatgtgtgtactcaactaacagaattgaacctttctttttacagagcagttttgaaacactctttttgtagaatctgcgaggggatatttggatagatttcaggatttcgttggaaacgggaatatctttatataaaatctcgacagaagcattctcagaagcttctttgtgatatgtgcattcaagtcacagagttgaatattccctttcacagagtaggtttgaaacactttttttctagtatctggaagtggacatttggagcgcattgacacctacggtgaaaagggaaatatcttctcataaaaagtagacagaagcaatctcagaatcttctttgggatatatgcacgcagctaacagagttgaacctttctattgacagagcagttttgaaacagcctttctgtggaatctgcaagtggatatttggatagcttggaggatttcgttggaaacgggattaagtataaaaagtagacagcagaatcctcagaaacttctttgtgatgtgtgcattcaagtcacagagttgaacattccctttcgtacagcagttttgaaacactctttctgtagtatctggaagtgaacattaggacagctttcaggtccatggtgagaaaggaaatatcttcaaataaaaactagacagaagcattctcataaacttgtttgtgatgtgtgaactcagctaacagaggtggatctttcttttgatagagcagttctgaaaaacactttttgttgaatctgcaagtggacatttggatagatttgaagatttcgttggaaacggggatatcttcatatcaaatctagacagaagcattctcagaaacgtctctgtcatgtttgcattcaactcatagagttgaacattccctttcagagagcagctttgaaacactctttttgtagtatgtgcaagtggatatttggagcgctctgaggcctacggtgaaaaagaaaatatcttcccataaccactagacagaaacattctcagaaactcctttatgacgtgtgcactcacctaacagagaagaaccttccttttgacagagcagttttgatacactctttttgtagaatctgcaagtggatatttgaatagctgtgaagatttcgttggaaacgggaatatcttcctataaaatctagacagaagcattctcagaaactgctctgtgatgtctgcattcaagtcacagagttgaacattgcctttcataaagcaggtttgaaacgctctttttgtaatatatggcagtggacgtttcggacggtttgaggcccatggtgataaagggaatatcttcccctacaagctagaaagaaagcattgtgtgaaacttgtttgtgatgtgtgtactcaactaacagagttgaacctttcttttcacagagcagttttgaaacactctttttgtagaatctgcgaggggatatttggatagatttcagcatttcgttggaaacgggaatatcttcatataaaatctcgacagaagcattctcagaaacttctttgtgatatctgcattcaagtcacagagttgaatattccctttcactgagtaggtttgaaacactctttttgtagtatctggaagtagacatttggagcgccttgacgcctacggtgaaaagggaaatatcttctcataaaaagtagacagaagcaatctcagaatcttctttgggatatatgcacgcagctaacagagttgaacctttctattgacagagcagttttgaaactgtctttctgtggaatctgcaagtggatatttggatagcttggaggatttcgttggaaacgggattacgtataaaaagtagacagcagcatcctcagaatcttccttattgatgtgtgctttcaagtcacagagttgaacattccctttcgtacagcagttttgaaaaactctttctgtagtatctggaagtgaactttaggagagctttcacgtctatagtgagaaaggatatatcttcaaataaaaactagacagaagcattctcataaacttgtttgtgatgtgtgaactcagctaacagacgtggatctttcttttgatacagcagttttgaaaaacactttttgttgaatctgcaagtggacatttggatagatatgaagatttcgttggaaatgggaatatcttcatatgaaatctagacagaagcattctcagaaacgtctttgtgatgtttgcattcaactcatagagttgaacattccgtttcagagagcagctttgaggcactctttttgtagtatgtgcaagtggatatttggagcgctctgaggcctacggtgaaaaagcaaatatcttcccataaacactagacagaaacattctcagaaaatcctttatgacgtatgcactcacctaacagagaagaaccttccttttgacagagcagttttgatacactctttttgtagaatctgcaagtggatatttggatagctgtgaagatttcgtttgaaacgggaatatcttcctataagatctagacagaagcattctcagaaactgctctgtgatgtctgcattcaagtcacagagttgaacattgcctttcatagaacaggtttgaaacgctctttttgtagtatatggaagtagacgtttcggacggtttgaggcccatggtgataaagggaatatcttcccctacaagctagaaagaagcattctgtgaaacttgtttgtgatgtgtgtactcaactaacagagcctttctttttacagagcagttttgaaactctctttttgaagaatctgcgaggggatatttggatagatttcaggatttcgttggaaacgggaatatcttcatataaaatctcgacagaagcattctcagaaacttctttgtgatatgtgaattcaagtcacagagttgaatattccctttcacagagtaggtttgaaacactctttttgtagtatctggaagtggacatttggagcgccttgacgcctacggtgaaaagggaaatatcttcccataaaaactagacagaagcaatctcagaatcttctctgggatatatgcacccagctaacagagttgaacctttctattgacagagcagttttgaaacagtctttctgtggaatctgcaagtggatatttggatagcttggaggatttcgttggaaacgggattacgtataaaaattagacagcagcatcctcagaaacttctttgtgatgtgtgcattcaagtcacagagttgaacattccctttcgtacagcagttttgaaacactctttctgtagtatctggaagtgaacattaggacagctttcaggtctatggtgagaaaggcaaaatcttcaaataaaaactagacagaagcattctcataaacttgtttgtgatgtgtgaactcagctaacagagatggatctttcttttgatagagcagttctgaaaaacactttttgttgaatctgcaagtggatatttggatagatttgaagatttcgttggaaacgggaagatcttcatatcaaatctagacagaagcattctcagaaacgtctttgtgatgtttgcattcaactcatagagttgaacattccctttcagagagcagttttgaagcactctttttgtagtaagtgcaaattgacatttggagcgctttgaggcctaaggggaaaaagcaaatatcttcccataaccagtagacagaaacattctcagaaactcctttatgacgtatgcactcacctaacagagaagaaccttccttttgacagagcagttttgatacactctttttgtatagtctgcaagtagatatttggatagctgtgaagatttcgttggaaacgggaatatcttcctataaaatctagacagaagcattctcagaaactgctctgtgatgtctgcattcaagtcacagtgttgaacattgcctttcatagagcaggtttctaacactctttttttagtatatggaagtggacgtttcggacggtttgaggcccatggagataacgggaatatcttcccctacaagctagaaagaagcattgtgtgcaacttgtttgtgatgtgtgtagtcaagtaacagagttgaacctttctttttacagagcagttttgaaacactctttttgtagaatctgcgaggggatatttggatagatttcaggatttcgttggaaacgggaatatcttcatataaaatctcgacagaagaattctcagaaacttctttgtgatatctgcattcaagtcacagagttgaatattccctttcacagagtaggtttgaaacactctttttgtagtatctggaagtggtcatttggagcgccttgacgcctacggtgaaaagggaaatatcttcccataaaaactagacagcagcaatctcagaatcttctttgggatatatgcacgcagctaacagagttgaacctttctattgacagagcagttttgaaacagtctttctgtggaatctgcaagtggatatttcgatagcttggaggatttcgttggaaacgggattaagtataaaaagtagacagccgcatcctcagaaacttctttgtgatgtgtgcattcaagtcacagagttgaacattccctttcgtacagcagttttgaaacactctttctgtagtatctggaagtgaacattaggacagctttcaggtctttggtgagaaaggaaatatcttcaaataaaaactagacagaagcattctcataaacttgtttgtgatgtgtgaactcagctaacagaggtggatctttcttttgatagagcagttctaaaaaacactttttgttgaatctgcaagtggacattttgatagatttgaagatttcgttggaaacgggaatatcttcatatcaaatctagacagaagcattctcagaaacgtctttgtgatgtttgcattcaactcatagagttgaacattccgtttcagagagcagctttgaagcactctttttgtagtatgtgtaagcggatatttggagcgctctgaggcctacggtgaaaaagcaaatatcttcccataaccactagacagaaacactctcagaaactcctttatgacgtatgcactcacctaacagagaagaaccttccttttgacagagcagttttgaaacactctttttgtagaatctgcaagtggatatttggatacctgtgaagatttcgttggaaacgggaatatcttcctataaaatctagacagaagcattctcagaaactgctctgtgatgtctgtattcaagtcacagagttgaacattgcctttcatagagcaggtttgaaacgctctttttgtagtatatggaagtggacgtttcggacggtttgaggcccatggtgataaagggaatatcttcccctacaagctagaaagaagcattctgtgaaacttgtttgtgatgtgtgtactcaactaacagagttgaacctttctttttacagagcagttttgaaacagtctttttgtagaatctgcgagggcatatttggatagatttcaggatttcgttggaaaggggaatatcttcatataaaatctcgacagaagcattctcagaaacttctttgtgatatctgcattcaagtcacagagttgaatattccctttcacagagtaggtttgaaacactctttttgtagtatctggaagtggacatttggagcgccttgacgcctacggtgaaatgggaaatatcttcccataaaaactagacagaagcaatctcagaatcttctttgggatatatgcactcagctaacagagttgaacctttctattgacagagcagttttgaaacagtctttctgtggaatctgcaagtggatatttggatagattggaggatttcgttggaaacgggattacgtataaaaagtagacagcagcatcctcagaaacttctttgtgatgtgtgcattcaagtcacagagttgaacattccctttcgtacagcagttttgaaacactctttctgtagtatctgggagtgaacattaggacagctttcaggtctatggtgagaaaggaaatatcttcaaataaaaactagacagaagcattctcataaacttttttctgatgtgtgaactcagctaacagaggtggatctttcttttgatagagcagttctgaaaaacactttttgttgaatctgcaagtggacatttggatagatttgaagatttcgttggaaacgggaatatcttcatatcaaatctagacagaagcattctcagaaacgtctttgtgatgtttgcattcaacgcatagagttgaacattccgcttcagagagcagctttgaagcactctttttgtagcatgtgcaagttgacatttggagcgctctgaggcctacggggaaaaagcaagtatcttcccataaccactagacagaaacattctgagaaacttctttatgacgtatgtactcaactagcagagaagaactttccttttgacagagcatttttgatacactctttttgtagtatctgcaagtggatatttggatagctgtgaagatttcgttggaaacgggaatatcttcctataaaatctagacagaagcattctcaggaaactgctctgtgatgtctgcattcaagtcacagcagttgaacattgcctttcatagagcaggtttgaaacgctctttttgtagtatatggaagtggacttttcggacggtttgaggcccatggtgataaagggaatatcttcccctacaagctagaaagaagcattctgtgaaacttgtttgtgatgtgtgtactcaactaacagagttgaacctttctttttacagagcagttttgaaacactctttttgtagaatctgcgaggggatatttggatagatttcaggatttcgttggaaacgggaataacttcatataaaatctcgacagaagcattctcagaaacttccttgtgatatgtgcattcaagtcacagagttgaatattccctttcacagagtaggtttgaaacactcttcttgtagtatctggaagtggacatttggagcgccttgacgcccacggtgaaaagggaaatatcttcccataaaaactagacagaagcaatctcagaatcttctttgggatatatgcacgcagctatcagagttgaacctttctattgacagagcagttttgaaacagtctttctgtggaatctgcaagtggatatttggatagcttggaggatttcgttggaaacgggattacgcataaaaagtagacagcagcatcctcagaaacttctttgtgatgtgtgcattcaagtcacagagttgaacattccctttcgtacagcagttttgaaacactctttctgtagtatgtggaagtgaacattaggacagctttcaggtctatggtgagaaaggaaatatcttcaaataaaaactagacagaagcattctcataaacttgtttgtgatgtgtgaactcagcttagagacgtggatctttcttttgatagagcagttctgaaaaacacgttttgttgaatctgcaagcggacatttggatagatttgaagatttcgttggaaacgggaatatcttcatatcaaatctagacagaagcattctcagaaacgtctttgtgatgtttgcattcaactcacagagttgaacattccctttcagagagcagctttgaagcactctttttgtagtatgtgcaaggggatatttggagcgctctgaggcctaaggtgaaaaagcaaatatcttcccctaaccactagacagaaacattctcagaaactcctttatgacgtatgcactcaactaacagagaagaaccttccttttgacagagcagttttgatacactctttttgtagaatctgcaagtggatatttggatagctgtgaagatttcgttggatacgggaatatcttcctataaaatctagacagaagcattctcagaaactggtctgtgatgtctgcattcaagtcacagagttgaacattgcctttcatagagcaggtttgaaacgctctttttgtagtatatggaagtagacgtttcggacggtttgaggcccatggtgataaagggaatatcttcccctacaagctagaaagaagcattctgtgaaacttttttgtgatgtgtgtactccactaacagagttgaacctttctttttacagagcagttttgaaacactctttttgtagaatctgcgaggggatatttggatagttttcaggatttcgttggaaacgggaatatcttcatataaaatctcgacagaagcattctcagaaacttctttgtgatatgtgcattcaagtcacagtgttgaatattccctttcacagagtaggtttgaaacactctttttgtagtatctggaagtggacatttggagcgccttgacgcctacggtgaaaagggaaatatcttcccataaaaactagacagacgcaatctcagaatcttctttgggatatatgtacgcagctaatagagttgaacctttctattgacagagcagttttgaaacagtctttctgtggaatctgcaagtggatatttggatagcttggaggatttcgttggaaacgggattacgtataaaaagtagacagcagcatcctcagaaacttctttgtgatgtgtgcattcaaatcacagagttgaacattccctttcgtacagcagttttgaaacactctttctgtagtatctggaagtgaacattaggacagctttcaggtctatggtgagaaaggaaatatcttcaaataaaaactagacagaagcattctcataaacttgtttgtgatgtgtgaactcagctaacagacgtggatctttctttagatagagcagttttgaaaaacactttttgttgaatctgcaagtggacatttggatagatttgaagatttcgttggaaacgggaatatcttcatatcaaatctagacagaagcattctcagaaaagtctttgtgatgtttgcattcaactcatagagttgaacattccgtttcagagagcagctttgaagcactctttttgtagtatgtgcaagtggatatttggagcgctctgaggcctacggtgaaaaagcaaatatcttcccataaccactagacagaaacattctcagaaactcctttatgacgtatgcactcacctaacagagaagaaccttccttttgacagagcagttttgatacactctttttgtagaatctgcaattggatatttggatagctgtgaagatttcgttggaaacgggaatatcttcctataaaatctagacagaagcattctcagaaactgctctgtgatgtctgcattcaagtcacagagttgaacattgcctttcatagagcaggtttgaaacgctctttttgtagtatatggaagtggatgtttcggacggtttgaggcccaaggtgataaagggaatatcttccctacaagctagaaagaagcattctgtgaaacttgtttgtgatgtgtgtactcaactaacagagttgaacatttctttttacagagtagttttgaaacactctttttgtagaatctgcgaggggatatttggatagatttcaggatttcgttggaaacgggaatatcttcatataaaatctcgacagaagcattctcagaaacttctttgtgatatctgcctttaagtcacagagttgaatattctctttcacagagtaggtttgaaacactctttttgtagtatctggaagtggacatttggagcgccttgacgcctacggtgaaaagggaaatatcttcccataaaaactagacagaagcaatctcagaatcttctttgggatatatgcacgcagctaacagagttgaacctttctattgacagagcagttttgaaacagtctttctgtggaatctgcaagtggatatttggatagcttggacgatttcgttggaaacgggattacgtataaaaagtagccagcagcatcctcagaaacttctttgtgatgtgtgcattcaagtcagagagttgaacattccctttcgtacagcagttttgaaacactctttctgtagtatctggaagtgaacattaggacagctttcaggtctatggtgagaaaggaaatatcttcaaataaaaactagacagaagcattctgataaacttgtttgtgaagtgtgaactcagctaacagaggtggatctttctttcgaaacagcagttttgaaaaacactttttgttgaatctgcaagtggacatttgaatagatttgaagatttcgttggaaacaggaatatcttcatatcaaatctagacagaagcattctcagaaacgtctttgcgatgtttgcattcaactcatagagttgaacattccgtttcagagagcagctttgaagcactgtttttgtagtatgtgcaagtgcatatttggagcgctctgaggcctacggtgaaaaagcaaatatcttcccataaccactagacagaaacattctcagaaactcctttatgacgtatgtactcaactaacagagaagaaccttccttttgaaagagcagttttgatacactctttttgtagaatctgcaagtggatatttggatagctgtgaagatttcgttggaaacgggaatatcttgcctataaaatctagacagaagcattctcagaaattgctctgtgatgtctgtattcaagtcacagagttgaacattgcctttcatagagcaggtttgaaacgctctttttgtagtatatggaagtggatgtttcggacggttggaggcccatggtgataaagggaatatcttcccctacaagctagaaagaagcattctgtgaaacttgtttgtgatgtgtgtactcaactaacagagttgaacctttccttttacagagcagttttgaaacactctttttgtagaatctgcgaggggatatatggatagatttcaggatttcgttggaaacgggaatatcttcatataaaatctcgacagaagcattctcagaaacttccttgtgatatgtgcattcaagtcacagagttgaatattccctttcacagagtaggtttgaaacactctttttgtaatatctgaaagtggacatttggagcgccttgacgcctacggtgaaaagggaaatatcttcccataaaaactagacagaagcaatctcagaatcttctttgggatatatgcacgcagctaacagagttgaacctttctattgacagagcagttttgaaacagtctttctgtggattctgcaagtggatatttggatagcttggaggatttcgttggaaacgggattacgtataaaaagtagacagcagcatcctcagaaacttctttgtgatgtgtgcattcaagtcacagagttgaacattccctttcatacagcagttttgaaacactctttctgtagtatctggaagtgaacattaggacagctttcagctctatggtgagaaaggaaatatcttcaaatataaactagacagaagcattctcataaacttgtttgtgatgtgtgaactcagctaacagaggtggatctttcttttgatagagcagttctgaaaaacactttttgttgaatctgcaagtggacatttggatagatttgaagatttcgttggaatcgggaatatcttcatatcaaatctagacagaagcattctcagaaacgtctttgtgatgtttgcattcaactcatagagttgaacattccctttcagagagcagctttgaagcagtctttttgtagtatgtgcaagtggatatttggagcgctctgaggcctacggtgaaaaagcaaatatcttcccataaccactagacagaaacattctcagaaacgcctttatgacgtatgcactcaccgaacagaaaagaaccttccttttgacagagcagttttgatacactctttttgtagaatctgcaagtggatatttggatagctgtgaagatttcgttggaaacgggaatatcttcctataaaatctagacagaagcattctcagaaactgctctgtgatgtctgcattcaagtcacagagttcaacattgtctttcatagagcaggtttgaaacgctctttttgtagtatatggaagtggacgtttcggacggtttgaggcccatggtgataaagggaatatcttcccctacaagctagaaagaagcattctgtgaaacttgtttgtgatgtgtgtactcaacttacatagttgaacctttctttttacagagcagttttgaaacactctttttgtagaatctgcgaggggttatttggatagatttcaggatttcgttggaaacgggaatatcttcatataaaatctcgacagaagcattctcagagacttccttgtgatatgtgcattcaagtcacagagttgaatattccctttcacagagtaggtttgaaacactctttttgtagtatctggaagtggtcatttggagcgccttgacgcccacggtgaaaagggaaatatcttcccataaaaactagacagaagcaatctcagaatcttctttgtgatatatgcacgcagctgacagatttgaacctttctattgactgagcagatttgaaacagtctttctgtggaatctgcaagtggatatttggatagattggaggatttcgttggaaacgggattacgtataaaaagtagacagcagtatcctcagaaacttgctttgtgatgtgtgcattcaagtcacagagttgaacattccctttcgtacagcagttttgaaacactctttctgtagtatctggaagtgaacattaggacagctttcaggtctatagtgagaaaggatatatcttcaaataaaaactagacagaagcattctcataaacttgtttgtgatgtctgaactcagctaacagaggtggatctttcttttgatagagcagttctgaaaaacactttttgttgaatctgcaagtggacatttggatagatttgaagatttcgttggaaacgtgaatatcttcaaatcaaatctagacagaagcattctcagaaacgtctttgtgatgtttgcattcaactcatagagttgaacattccgtttcagagagcagctttgaagcactctttttgtactatgtgcaagtggatatttggagcgctctgagacctacggtgaaaaagcaaatatcttcccataaccactagacagaaacattctcagaaactcctttatgacgtatgcactcacctaacagagaagaaccttcccttttgacagagcagctttgatacactctttttgtagaatctgcaagtggatatttggatagctgtgaagatttcgttggaaacgggaatatcttcctataaaatctagacagaagcattctcagaaactgctctgtgatgtctgcattcaagtcacagagttgaacattgcctttcatagagcaggtttgaaacgctctttttgtagtatattgaagtggacgtttcggacggtttgaggcccatggtgataaagggaatatcttcccgtacaagctagaaagaagcattctgtgaaacttgttggtgatgtgtgtactcaactaacagagttgaacctttcttttcacagagcagttttgaaacactctttttgtagaatctgcgaggggatatttggatagatttcagcatttcgttggaaacgggaatatcttcatataaaatctcgacagaagcattctcagaaacttccttgtgatatgtgcattcaagtcacagagttgaatattccctttcacagagtaggtttgaaacactctttttgtagtatctggaagtggacatttggagcgccttgacgcccacggtgaaaagggaaatatcttcccatcaaaactagacacaagcaatctcagaatcttctttgggatgtatgcacccagctaacagagttgaaactttctattgacagagcagttttgaaacagtcttttagtggaatctgcaagtggatatttggatagcttggaggatttctttggaaacgggattatgtatacaaagtagacagcagcattctcagaaacttctttgtgatgtgtgcattcaagtcaaagagttgaacattccctttcgtataggaggtttgaaacactctttctctagtacctggaagtgaacggggcgagagctttcaggtctatggtgagaaaggaaatatcttcaaataaaaactagacagaagcattctcataaacttgtttgtgatgtgtgaactcagctaacagaggtggatctttcttttgatagagcagttctgaaaaacactttttgttgaatctgcaagtggacatttggatagatttgaagatttcgttggaaaagggaatatcttcatatcaaatctagacagaagcattctcagaaacgtctttgtgatgtttgcattcaactcatagagttgaacattccgtttcagagagcagctttgaggcactctttttgtagtatgtgcaagtggatatttagagcgctctgaggcctacgttgaaaaagcaaatatcttcccataaccactagacagaaacattctcagaaacttctttgtgacgtacgtactcaactaacagagttgaaccttccttttgacacagcaattttgatacaatctttttgtagaatctgcaagtctatatttggataactgtgaagatttcgttggaaacgggaatttcttcctataaaatctagacagcagcattctcagaaactgctctgtgatgtctgcattcaagtcacagagttgaacattgcctttcatagagcaggtttcaaacactctttttttagtttatggaagtggacgtttcggacggtttaaggcccatggtgataaaggaaatatcttcccctacaagctagaaagaagcattctgtgaaacttgtttgtgatgtgtgtactcaactaacagagttgaacctttctttttacagagcagttttgaaacactctttttgtagaatctgcgaggggaaatttggatagatttcaggatttccttggaaacgggaatatcttcatacaaaatctcgacagaagcatcctcagaaacttctttgtgatgtgtgcattcaagtcacagagttgaacattccctttcacagagtaggtttgaaacactctttttgtagtatctggaagtggatatttggagcgccttgacacctacggtgaaaagggaaatatcttcccataaaaactagacagaagcaatctcagaatcttctttgggatatatgcacgcagctaacagagttgaacctttctattgacagagcagttttgaaacagtctttctggggaatctgcaagtggatatttggatagcttggaggatttcgttggaaacgggattacgtataaaaagtagacagcagcatcctcagaaacttctttgtgatgtgtgcattcaagtcacagagttgaacattccctttcgtagagcagttttgaaacactctttctgtagtatctggaagtgaacattaggacagctttcagctctatggtgagaaaggaaatatcttcaactaaaaactagacagaagcattctcataaacttgtttgtgatgtgtgaactcagctaacagaggtggatctttcttttgatagagcagttctgaaaaacactttttgttgaatctgcaagtggatatttggatagattgaagatttcgttggaaacgggaatatcttcatatcaaatctagagagaagcattctcagaaacgtctttgcgatgtttgcattcaactcatagagttgaacattccgtttcagagagcagctttgaggcactctttttgtagtatgtgcaagtggatatttggagcgctctgaggcctacggtgaaaaagcaaatatcttcccataaccacaagacagaaacattctcagaaactcctttatgacttatgcacttacctatcagagaagaatcttccttttgacagagcagttttgatacactctttttgtagaatctgcaagtggatatttggatagctgtgaagatttcgctggaaacgggaatatcttcctataaaatctagacagaagcattctcagaaactgctctgtgatgtctgcattcaagtcacagagttgaacattgcctttcctataacaggtttgaaacgctctttttgtagtatatggaagtggacgtttcggacggtttgaggcccatggtgataaagggaatatcttcccctacaagctagaaggaagcattctgtgaaacttgtttgtgatgtgtgtactcaactaacagagttgaacctttcttttcacagagcagttttgaaacactctttttgtagaatctgcgagcggatatttggatagatttcaggatttcgatggaaacgggaatatcttcatataaaatactcgacagaagcattctcagaaacttctttgtgatatctgcattcaagtcacagagttgaatattccctttcacagagtaggtttgaaacactctttttgtagtatctggaagttgacatttggagcgccttgacgcctacggtgaaaagggaaatatcttctcataaaaagtagacagaagcaatctcagaatcttctttgggatatatgcacgcagctaacagagttgaacctttctattgacagagcagttttgaaacagtctttctgtggaatctgcatgtggatatttggatagcttggaggatttcgttggaaacgggattacgcataaaaagtagacagctgcatcctcagaaacttctttgtgatgtgtgcattcaagtcacagagttgaacattccctttcgtacaacagttttgaaacactctttctgcagtatctggaagtgaacattaggacagctttcaggtctatggtgagaaaggaaatatcttcaaataaaaactagacagaagcattctcataaacttgtttgtgatgtgtgaactcagctaacagaggtggatctttcttttgatagagcagttctgaaaaacactttttgttgaatctgcaagtggacttttggatagatttgaagatttcgttggaaacgttaatatcttcatatcaaatctagacagaagcactctcggaaacgtctttgtgatgtttgcattcaactcatagagttgaacattccgtttcagagagcagctttgaagcactctttttgtagtatgtgcaagtggatatttggagcgctctgaggcctacggtgaaaaagcaaatatcttcccataaccactagacagaaacattctcagaaactcctttatgacgtatgcactcacctaacagagaagaaccttccttttgacagagcagttttgatacactctttttgtagaatctgcaagtggatatttggatagctgtcaagatttcgttggaaacgggaatatcttcctataaaatctagacagaagcattctcagaaactgctctgtgatgcctgcattcaagtcacagagttgaacattgcctttcatagagcaggtttgaaatgctctttttgtagtatatggaagtggacgtttcagacggtttgaggcccattgtgataaagggaatatcttcccctacaagctagaaagaagcattctgtgaaacttgtttgggatgtgtgtactcaactaacagagttgaacctttctttttacagagcagttttgaaacactctttttgtagaatctgcgaggggatatttggatacatttcagcatttcgttggaaacgggaatatcttcatataaaatctcgacagaaacattctcagaaacttcattgtgatatctgcattcaagtcacagagttgaatattccctttcagagagtaggtttgaaacactctttttgtagtatctggaagtggacatttggagcgccttgacacctacggtgaaaagggaaatatcttcccatgaaaacgagacagaaacaatctcagaatcttctttgggatatatgcacgcagctaacagtgttgaacctttctattgacagagcagttttgaaacagtctttctgtggaatctgcaagtggatatttggatagcttggaggatttcgttggaaacgggattaggtataaaaagtagacagcagcatcctcagaaacttctttgtgatgtgtgcattcaagtcacagagttgaacattccctttcgtacagcagttttgaaacactctttctgcagtatctggaagtgaacattaggacagctttcagctctatggtgagaaaggaaatatcttcaaataaaaactagacagaagcattctcataaacttgtttgtgatgtgtgaactcagctaacagaggtggatctttcttttgatagagcagttcttaaaaacacgttttgttgaatctgcaagtggacatttggatagatttgaagatttcgttggaaacgggaatatcttcatatcaaatctagacagaagcattctcagaaacgtctttgtgatgtttgcattcaactcatggagttgaacattccctttcagagagcagctttgaagcactctttttgtagtatgtgcaagtggacatttggagcgctttgaggcctacggggaaaaagcaaatatcttcccatatccactagacaaaaacattctcagaaactcctttatgacgtatgcactcacctaacagagaagaaccttccttttgacagagcagttttgatacactctttttgtagaatctgcaagtggatatttggatagctgtgaagatttccttggaaacgggaatatcttcctataaaatctagacagaaagcattctcagaaactgctctgtgatgtctgcattcaagtcacagagttgaacattgcctttcatagagcaggtttgaaacgctctttttgtactatatggaagtggatgtttcggacggtttgaggcccatggtgataaagggaatatcttcccctacaagctagaaagaagcattctgtgaaacttgtttgcgatgtgtgtactcaactaatagatttgaacctttctttttacagagcagttttgaaacactctttttgtagaatctgcgaggggatatttggatagatttcaggatttcgttggaaacgggaatatcttcatataaaatctcgacagaagcattctctgaaacttctttgtgatatgtgcattcaagtcacagagttcaatattccctttcacagagtaggtttgagacactctttttgtagtatctggaagtggacatttggagcgccttgacgactacggtgaaaagggaaatatcttctcataaaaagtagacagaagtaatctcagaatcttctttgggatatatgcacccagctaacagagttgaacctttctattgacagagcagttttgaaacagtctttctgtggaatctgcaagtggatatttggatagcttggaggatttcgtaggaaacgggattacgtataaaaagtagacagcagcatcctcagaaacttgtttgtgatgtgtgcattcaagtcacagagttgaacattccctttcgtacagcagttttgaaacactctttctgtagtatctggaagtgaacattaggacagctttcaggtctatggtgagaaaggaaatatcttcaaataaaaactagacagaagcattctcataaacttgtttgtgatgtgtgaactcagctaacagaggtggatctttcttttgatagagcagttctgaaaaacacgttttcttgaatctgcaagtggacatttggatagatttgaagatttcgttggaaacgggaatatcgtcatatcaaatctagacagaaagcattctcagcaaacgtctttgggatgtttgcattcaactcatagagttgaacattccctttcagagagcagctttgaagcactctttttgtagtatgtgcaagtggatatttggagcgctctgaggcctaaggtgaaaaagcaaatatcttcccataaccactagacagaaacattctcagaaagttctttatgacgtatgaactcaactagcagagaagaactttccttttgacagagcatttctgatacactctttttttactatctgcaagtggatatttggatagctgtgaagatttcgttggaaacgggaatatcttcctataaagtctggacagaagcattctcagaaactgctctgtgatgtctgcattcaagtcacagagttgaacattgcctttcatagagcaggtttgaaacgctctttttgtagtatatggaagtggacttttcagacggtttgaggcccatggtgataaagggaatatcttcccctacaagctagaaagaagcattctgtgaaacatgtttgtgatgtgtgttctcaactaacagagttgaacctttctttttacagagcagttttgaaacactctttttgtagaatctgcgaggggatatttggatagatttcaggatttcgttggaaacgggaatatcttcatataaaatctcgacagaagcattctcagaaacttctttgtgatatctgccttcaagtcacagagttgaatattccctttcacagagtaggtttgaaacactctttttgtagtatctggaagtggacatttggaacgccttggcgcctatggtgaaaaggtaaatatcttcccataaaaactagacagaagcaatctcagaatcttctttgggatatatgcacgcagctaacagagttgaacctttctattgacagagcagttttgaaacagtctttctgtggaatctgcaagtggatatttggatagcttggaggatttcattggaaacgggattaagtataaaaagtagacagcagcatcctcagaaacttctttgtgatgtgtacattcaagtcacagagttcaacattccctttcgtacagcagttttgaaacactctttctgtagtatctggaagtgaacattaggacagctttcagctctatggtgagaaaggaaatatcttcaaataaaaactagacagaagcattctcataaacttgtttgtgatgtgtgaactcagctaacagaggtggatctttcttttgatagagcagttctgaaaaacacttttttttgaatctgcaagtggacatttggatagatttgaagatttctttggaaacgggaatatcttcatatcaaatctagacagaagcattctcagaaacgtctttgtgatgtttgcattcaactcatagagttgaacattccgtttcagagagtagctttgaagcactcattttgtagcatgtgcaagtggacatttggagcgccctgaggcctacggggaaaaagcaaatatattcccataaccactagacagaaacattctcagaaactcctttatgacgtatgtactcaactaacagagaagaaccttccttttgacagagcagttttgatacactctttttgtagaatctccaagtggatatttggatagctgtgaagatttcgttggaatcgggaatatcttcctataaaatctagacagaagcattctcagaaactgctctgtgatgtctgcattcaagtcacagagttgaacattgcctttcatagagcaggtttgaaacgctctttttgtagtgtatggaagtggacttttcggacggttggaggcccatggtgataaagggaatatcttcccctacaagctagaaagaaagcattctgtgaaacttgtttgtgatgtgtgtactcaactaacagagttgaacctttctttttacagagcagttttgaaacactctttttgtagaatctgcgaggggatatttggatacatttcaggatttcgttggaaacgggaatatcttcatataaaatctcgacagaagcattctcagaaacttctttgtgatatgtgcattcaagtcacagagttgaatattccctttcacagagtaggtttgaaacactctttttgtagtatctggaagtggacatttggagcgccttgacacctacggtgagaagggaaatatcttcccataaaaactagacagaagcaatctcagaatcttctttgggatatatgcacgcagctaacggagttgaacctttctattgacagagcagttttgaaacagtctttctgtggaatctgcaagtggatatttggatagcttggaggatttcgttggcaacgggattacgtataaaaattagacagcagcattctcagaaacttctttgtgatgtgtgcattcaagtcaaagagttgaacattccctttcgtacagcaggtttgaaacactctttctctagtacctggaagtgaacgtttcgagacctttcaggtctatggtgagaaaggaaatatcttcaaataaaaactagacagaagcattctcataaacttgtttgtgatgtgtgaactcaactaacagaggtgggtctttcttttgatacaccagttatgaaaaacccttttaattgaatctgcaagtggacatttggatagatttgaagatttcgttggaaacgggaatatcttcatatcaaatctagacagaagcattctcagaaacgtctttgcgatgtttgcattcaactcatagagttgaacattccgtttcagagagcagctgtgaggcactctttttgtagtatgtgcaagtggatatttggagcgctctgaggcctacggtgaaaaagcaaatatcttcccataaccactagcagaaaacattctcagaaactcctttatgacgtatgtactcaactaacagagaagaaccttccttttgacagagcagttttgatccactctttttgtagaatctgcaagtggatatttggatagctgtgaaggtttcgttagaaacggaaatatcttcctataaaatgctagacagaagcattctcagaaacggctctgtgatgtctgcattcaagtcacagagttgaacattgcatttcatagagcaggtttcaaacactctttttttagtatatggaagtggacctttcagacggcttgaggaccatggtgataaaggaaatatcttcccctacaagctagaaagaagcattctgtgaaacttgtttgtgatgtgtgtactcaactaacagagttgaacctttctttttacagagcagttttgaaacactctttttgtagaatctgcgaggggatatttggatagatttcaggatttcgttggaaacgtgaatatattcatataaaatcccgacagaagcattctcagaaacttcattgtgatatctgcattgaagtcacagacttgaatactccctttcacagagtaggtttgaaacactctttttgtagtatctggaagtggacatttggatcgctttgacgcctattgtgaaaaaggaaatatcttcccctaaaaactagacagaaacgttctcagaaactcctttatgacgtatgcactcacctaacagagaagaaccttccttttgacagagcagttttgatacactctttttgtagaatctgcaagtggatatttggatagctgtgaagatttcgttggaaacgggaatatcttcctataaaatctagacagaagcattctcagaaactgctctgtgatgtctgcattcaagtcacagagttgaacattccctttcatacagcagttttgaaacactctttctgtagtatctggaagtcaacattaggacagctttcaggtctatggtgagaaaggaaatatcttcaaataaaaactagacagaagcattctcataaacttgtttgtgatgtctgaactcagctaacagaggtggatctttcttttgatagagcagttctgaaaaacactttttgttgaatctgcaagaggacatttggatagatttgaagatttcgttggaaacgggaatatcttcatatcaaatctagacagaagcattctcagaaacgtctttgtgatgtttgcattcaactcatagagttgaacattccctttcagagagcagctttgaagcactctttttgtagtatgtgcaagtggatatttggagctctctgaggcctacggtgaaaaagcaaatatcttcccataaccactagacagaaacattctcagaaactcctttatgacgtatgtactcatctaacagagaagaaccttccttttgacagagcagttttgatacactctttttgtagaatctgcaagtggatatttggatagctgggaagatttcgttggaaacgggaatatcttcctataaaatctagacagaagcattctcagaaactgctctgtgatgtctgcattcaagtcacagagttgaacattacctttcctagagcaggtttgaaacgctctttttgtagtatatggaagtagacgtttcggacggtttgaggcccatggtgataaagggaatatcttcccctacaagctagaaagaagcattgtgtgaaacttgtttgtgatgtgtgtactcaactaacagagttgaacctttgtttttacagagcagttttgaaacactctttttgtagaatctgcgaggggatatttggatacatttcaggatttcgttggaaacgggaatatcttcatataaaatctcgacagaagcattctcagaaacttctttgtgatatgtgcattcaagtcacagagttgaaaattccctttcacagagtaggtttgaaacactctttttgtagtatctggaagtggacatttggagcgccttgacgcctacggtgaaaagggaaatatcttcccataaaaactagacagaagcaatctcagaatcttctttgggatgtatgcacgcagctaacagagttgaacctttctattgacagagcagttttgaaacagtctttctgtggaatctgcaagtggatatttggatagcttggaggatttcgttggaaacgggattacgtataaaaagtagacagcagcatcttcagaaacttctttgtgatgtgtgcattcaagtcacagagttgaacattccctttcgtacagcagttttgaaacactctttctgtagtatctggaagtgaacattaggacagctttgaggtctacggtgagaaaggcaatatcttcaaataaaaactggacaaaagcattctcataaacttgtttgtgatgtctgaactcagctaacagtaggtggatctttcttttgatagagcagttctgaaaaacactttttgttgaatctgcaagtggacatttggatagatttgaagatttcgttggaaacgggaatatcttcatatcaaatctagacagaagcattcccagaaccgtctttgtgatgtttgcattcaactcatagagttgaacattccctttcagagagcagctttgaagcactctttttgtaggatgtgcaaggggatatttggagcgctctgaggcctaaggtgaaaaagcaaatatcttcccataaccactagacagaaacattctcagaaactcctttatgacgtatgtactcaactaacagagaagaaccttccttttgacagagcagttttgatacactctttttgtagaatctgcaagtggatattggatagctgtgaagatttccttggaaacgggaatatcttcctataaaatctagacagaagcattctcagaaactgctctgtgatgtctgcattcaagtcacagagttgaacattgcctttcctagagcaggtttgaaacgctctttttgtagtatatggaagtggacgtttcggacggtttgaggcccatggtgataaagggaatatcttcccctacaagctagaaggaagcattctgtgaaacttgtttgtgatgtgtgtactcaactaacagagttgaacctttcttttaacagagcagttttgaaacactctttttgtagaatctgcgaggggatatttggatagatttcaggatttcgttggaaacgggaatatcttcatataaaatctcgacagaagcattctcagaaacttctttgtgatatctgcctttaagtcacagagttgaatattccctttcacagagtagctttgaaacactctttttgtagtatctggaagtggacatttggagcgccttgacacctacggtgaaaagggaaatatcttcccataaaaactagacagaagcaatctcagaatcttctttgggatatatgcacgcagctaacagagttgaacctttctattgacagagaagttttgaaacagtctttctgtggaatctgcaagtggatatttggatagcttggaggatttcgttggaaacgggattacgtataaaaattagacagcagcatcctcagaaacatccttgtgatgtgtgcattcaagtcacagagttgaacattccctttcatacagcagttttgaaacactctttctgtagtatctggaagtgaactttaggagagctttcaggtctatagtgagaaaggatatatcttcaaataaaaactagacagaagcattctcataaacttgttcgtgatgtgtgaactcagctaacacacgtggatctttcttttgatagagcagttctgaaaaacactttttgttaaatctgcaagaggacatttggatagattagaagatttcgttggaaacgggaatatcttcatatcaaatctagacagaagcattctcagaaacgtctttgtgatgtttgcattcaactcatagagttgaacattccctttcatagagcagctttgaagcactctttttgtagtatgtgcaagcggatatttggagcactctgaggcctaaagtgaaaaagaaaatatcttcccataaccactagacagaaacattctcagaaactcctttatgacgtatgcactcacctaacagagaagaaccttccttttgacagagcagttttgatacactctttttgtagaatctgcaagtggatatttggatagctgtgaagatttcgttggaaacggtaatatcttcctataaaatctagacagaagcattctcagaaactgctctgtgatgtctgcattcaagtcacagagttgaacattgcctttcatagagcaggtttgaaacgctctttttgtagtatatggaagtggacgtttcggacggtttgaggcccatgatgataaagggaatatcttcccctacaagctagaaagaaagcattctgtgaaacttgtttgtgatgtgtgtactcaactaactgagttgaacctttctttttacagagcagttttgaaacactctttttgtagaatctgtgaggggatatttggatagatttcaggatttcgttggaaacgggaatatcttcatataaaatctcgacagaagcattctcagaaacttctttgtgatatgtgcattcaagtcaccgagttgaatattccctttcacagagtaggtttgaaacactctttttgtagtatctggaagtggacatttggagcgccttgacgcctatggtgaaaagggaaatatcttcccataaaaactagacagaaagcaatctcagaatcttctttgggatatatgcacgcagctaacagagttgaacctttctattgactgagcagatttgaaacagtctttctgtggaatctgcaagtggatatttggatagattggaggatttcgttggaaacgggattacgtatcaaaagtagacagcagcatcctcagaaacttctttgtgatgtgtgcattcaagtcacagagttgaacattccctttcgtacagcagttttgaagcactctttctgtattatctgggagtgaacattaggacagctttcaggtctatggtgagaaaggaaatatcttcaaataaaaactagacagaagcattctcataaacttgtttgtgatgtgtgaagtcagctaacagaggtggatctttcttttgatagagcagttctgaaaaacactttttgttgaatctgcaagtggacatttggatagatttgaagatttcgttggaaacgggaatatcttcatatcaaatctagacaaaaggattctcggaaacgtctttgtaatgtttgcattcaactcatagagttgaacattccgtttcagagagcagctttgaagcactctttttgtagtatgtgcaagtggatatttggagcgctctgaggcctacggggaaaaagcaaatatcttcccataaacactagactgaaacattctcagaaactcctttatgacgtatgcactcacctaacagagaagaaccttctttttgacagagcagttttgatacactctttttgtagaatctgcaagtggatatttggatagctgtgaagatttcgttggaaacgggaatatcttcctataaaatctagacagaagcattctcagaaactactctgtgatgtctgcattcacgtcacagagttgaacattgcctttcatagagcaggtttgaaacactctttttgtagtatatggaagtggacgtttcggacggtttgaggcccatggtgataaagggaatatcttcccctacaagctagaaagaagcattctgtgaaacttgcttgtgatgtgtgtactcaactaacagagttgaacctttcttttcacagagcagttttgaaacactctttttgtagaatctgcgaggggatatttggatagatttcaggatttcgttggaaacgggaatatcttcatataaaatctcgacagaagcattctcagaaacttccttgtgatatgtgcattccagtcacagagttgaatattccctttcacagagtaggtttgaaacactctttttgtagtatctggaagtggacatttggagcgccttgacgcctacggtgaaaagggaaatatcttcccataaaaactagacagaagcaatctcagaatcttctttgggatatatgcacgcagctattagagttgaacctttctattgacagagcagttttgaaacagtctttctgtggaatctgcaagtggatatttggatagcttgggggatttctttggaaacgggattacgtataaaaagtagacagcagcatcctcagaaactattttgtgatgtgtgcattcaagtcacagagttgaacattccctttcgtacagcagttttgaaacactctttctgtagtatctggaagtgaacattaggacagctttcaggtctatggtgagaaaggaaatatcttcaaataaaaactagacagaagcattctcataaacttgtttgtaatgtgtgaactcagctaacagagatgggtctttcttttgatagagcagttctgaaaaacactttttgttgaatctgcaagtggacatttggatagatttgaagatttcgttggaaacgggaatatcttcatatcaaatctagacagaagcattctcagagacgtctttgtgatgtttgcattcaactcatagagttgaacattccctttcagagagcagctttgaagcactctttttgtagcatgtgcaagtggacatttggagcgccctgaggcctacggtgaaaaagcaaatatcttcccataaccactagacagaaacattctcagaaacttctttatgacgtatgttctcaactagcagagaagaactttccttttgacagagcttttttgatacactctttttgtagtatctgcaagtggatatttggatagctgtgaagatttcgttggaatcgggaatatcttcctataaagtctggacagaagcattctcagaaactgctctgtgatgcctgcattcaagtcacagagttgaacattgcctttcatagagcaggtttgaaacgctctttttgtagtatatggaagtggatgtttcggacggttggaggcccatggtgataaagggaatatcttcccctacaagctagaaagaagcattctgtgaaacttgtttgtgatgtgtgtactcaactaacagagttgaacctttctttttacagagcagttttgaaacactctttttgtagaatctgcgaggggatatttcgatagatttcaggattttgttggaaacgggaatatcttcatataaaatctcgacggaagcattctcagaaacttctttgtgatatgcgcattcaagtcacagagttgaatattccctttcacagagtaggtttgaaacactctttttgtagtatctggaagtggacatttggagcgccttgacgcctacggtgaaaagggaaatatcttcccataaaaactagacagaagcaatctcagaatcttctttgggatatatgtacgcagctaacagagttgaacctttctattgacagagcagatttgaaacagtctttctgtggaatctgcaagtggatatttggatagcttggaggatttcgttggaaacgggattacgtataaaaagtagacagcagcatcctcagaaacttctttgtgatgtgtgcattcaagtcacagagttgaacattcgctttcgtacagcagttttgaaacactctttctgtagtatctggaagtgaacattaggacagctttcaggtctatggtgagaaaggaaatatcttcaaataaaaactagacagataagcattctgataaacttgtttgtgaagtgtgatctcagctaacagaggtggatctttcttttgatagagcagttctgaaaaacactttgttgaatctgcaagtggacatttggatagatttgaagatttcgttggaaacgggaatatcttcatatcaaatctagacagaagcattctcagaaacgtatttgttatgtttgcattcaactcatagaattgaacattccctttcagagagcagctttgaagcactctttttgtagtatgtgcaaggggatattttgagcgctctgaggcctaaggtgaaaaagcaaatatcttcccataaccactagacacaaacattctcagaaactcctttacgacgtatgtactcaactaacagagaagaaccttccttttgacagagcagttttgatacactctttttgtagaatctgcaagtggatatttggatagctgtgaagatttcgttggaaacgggaatatcttcctataaaatctagacagaagcattctcagaaactgctctgtgatgtctgtattcaagtcacagagttgaacattgcctttcatagagcaggtttgaagcgctctttttgtagtatatggaagtggatgtttcggacggttggaggcccatggtgataaagggaatatcttcccctacaagctagaaagaagcattctgtgaaacttgtttgtgatgtgtgtactcaactaacagaattgaacttttctttttacagagcagttttgaaacactctttttgtagaatctgcgaggggttatttggatagatttcaggatttcgttggaaacgggaatttcttcctataaaatcttgacagaagcattctcagaaacttccttgtgacatgggcattcaagtcacagagttgaatattccctttcacagagtaggtttgaaacactctttttgtagtatctggaagtggacatttggagcgccttgacgcctacggtgaaaagggaaatatcttcccataaaaactagacagaagcaatctcagaatcttctttgggatatatgcacgcagctaacagagttgaacctttctattgacagagcagttttgaaacagtctttctgtggaatctgtaagtggatatttggatagcttggaggatttcgttggaaacgggattacgtataaaaagtagacagcagcatcctcagaaacttctttctgatgtgtgcattcaagtcacagagttgaacattccctttcgtacagcagttttgaaacactctttctgtagtatctggaagtgaacattaggacagctttcagctctatggtgagaaaggaaatatcttcaaataaaaactagaccgaagcattctcataaacttgtttgtgatgtgtgaactcagctaacagaggtggatctttcttttgatagagcagttctggaaaacactttttgttgaatctgcaagtggacatttggatagatttgaagatttcgttggaaacgggaatatcttcatatcaaatctagacagaagcattctgagaaacgtctttgtgatgtttgcattcaactcatagagtgtaacattccctttcagagagcagctttgaagcactctttttgtagtatgtgcaagtggatatttggagcgctctgaggcctacggtgaaaaagcaaatatcttcccataaccactagacagaaacattctcagaaacttctttatgacgtatgtactcaactagcagagtaagaactttccttttgacagagcatttctgatacactctttttgtactatctgcaagtggatatttggatagctgtgaagatttcgttggaaacgggaatatcttcctataaagtctggacagaagcattctcagaaactgctctgtgatgtctgcattcaagtcacagagttgaacattgcctttcatagagcaggtttgaaacgctctttttgtagtatataaaagtggacgtttcggacggtttgaggcccatggtgataaagggaatatcttcccctacaacctagaaagaagcattctgagaaacttgtttgtgatgtgtgtactcaactaagagaagtgaaactttctttttacagagcagttttgaaacactctttttctagaatctgcgaggggatatttggatagattacagaatttcgttgtaaacgggaatatcttcataaaaaatctcgacagaagcattctcagaaacttctctgtgatatgtgcattgaagtcaccgagttaaatattcccttccacacagtaggtttgaaacactctttttttttagtatctggaagtggaaatttggagcgctttgatgcctatggtgaaaaaggaaatatcttccaataaaaactagtcagaagcaatctcagaatcttctttgggatatatgcacgcagctaacagagttgaacctttctattgccagagcagtcttgaaacagtctttctgtggaatctgcaagtggatatttggatagcttggaggatttcgttggaaacgggattacgtataaaaagtagacagcagcatcctcagaaacttctttgtgatgtgtgcattcaagtcacacagttgaacattccctttcgtacagcagttttgaaacactctttctgtagtatctggaagtgaacattaggacagctttcagctctatgttgagaaaggaaatatcttcaaataaaaactagacagaaagcattctcataaacttgtttgtgatgtgtgaactcagctaacagaggtggatctttcttttgatagagcagttctgaaaaacactttttgttgaatctgcaagtggacatttggatagatttgaagatttcgttggtaacgggaatatcttcatatcaaatctagacagaagcattctcagaaacgtctttgtgctgttggcattcaactcatagagttgaacattccgtttcagagagcagctttgaggcactctttttgtagtatgtgcaagtggatatttggagcgctctgaggcctacggtgaaaaagcaaatatcttcccataaccactagacagaaacattctcagaaactcctttatgacgtatgcactcacctaacagagaagaaccttccttttgacagagcagttttgatacactctttttgtagaatctccaagtggatatttggatagctgtgaagatttcgttggaaacgggaatatcttcttatgaaatctagacagaagcattctcagaaactgctctgtgatgtctgcattcaagtcacagagttgaacattgcctttcatagagcaggtttgaaaggctctttttgtactatatggaagaggacgtttcgaacggtttgaggaccatggtgataaagggaatatcttcccctacaagctagaaagaagcattctgtgaaacttgtttgtgatgtgtgtactcaactaacagagttgaacctttgtttttacagagcagttttgaaacactctttttgtagaatctgcgagcggatatttggatagatttcaggatttcgttggaaacgggaatatcttcatataaaatctcgacagaagcattctcagaaacttctttgtgatatctgcattcaactcacagagttgaatattccctttcacagagtaggtttgaaacactctttttgtagtatctggaagtggacatttggagcgccttgacgcctacggtgaaaagggaaatatcttcccataaaaactagacagaagcaatctcagaatcttctttgggatatatgcatgcagctaacagagttgaacctttgtattgacagagcagttttgaaacagtctttctgtggaatctgcaagtggatatttggatagcttggaggatttcgttggaaacgggattacgtataaaaagtagacagcagcatcctcagaaacttctttgtgatgtgtgcattcaagtcacagtagttgaacattctctttcgtacagcagttttgaaatgctctttctgtagtatctggaagtgaacattaggacagctttcaggtctatggtgagaaaggaaatatcttcaaataaaaactagacagaagcattctaataaacttgtttgtgatgtgtgaactcagctaacacaggtggatctttcttttgatagagcagttctgaaaaacactttttgttgaatctgcaagtggacatttggatagatttgaagatttcgttggaaacgggaatatcgtcatatcaaatctagacagaagcattgtcagaaacgtctttgtcatgtttgcattcaactcatagagttgaacattccgtttcagagagcagctttgaagcactctttttgtagtatgtgcaagcggatatttggagcgctctgaggcctacggtgaaaaagcaaatatcttcccataaccactagacagaaacattctcagaaactgctttatgacgtatgcactcacctaacagagaagaaccttccttttgacagagcagttttgatacactctttttgtagaatcttcaagtggatattgggatagctgtgaagatttcgttggaaacgggaatatcttcctataaaatctagacagaagcattctcagaaactgctctgtgatgtctgcattcaagtcacagagttgaacattgcctttcatagagcaggtttgaaatgctctttttgtagtatatggaagtggatgtttcagacggttggaggcccatggtgataaagggaatatcttcccctacaagctagaaagaagcattctgtgaaactagtttgtgatgtgtgtactcaactaacagagttgaacctttctttttacagagcagttttgaaacactctttttgtagaatctgcgaggggttatttggatacatttcagcatttcgttggaaacgggaatatcttcatataaaatctcgacagaagcattctcagaaacttccttgtgttatgtgcattcaagtcacagagttgaatattccctttcacagagtaggtttgaaacactctttttgtagtatctggaagtggacatttggagcgcctggacgcctacggtgaaaagggaaatatcttcccataaaaactagacagaagcaatctcagaatcttctttgggatatatgcacgcagctaacagagttgaacctttctattgacagagcagttttgaaacagtctttctgtgtaatctgcaagtggatatttggttagattggaggatttcgttggaaacgggattacgtataaatagtagacagcaacatcctcagaaacttctttgtgatgtgtgcattcaagtcacagagttgaacattccctttcgtacagcagttttgaaacactctttctgtagtatctggaagtgaacattaggacagctttcaggtctatggtgagaaaggaaataccttcaaataaaaactagacagaagcattctcataaacttgtttgtgatgtgtgaactcagctaacggaggtggatctttcttttgatagagcagttctgaaaaacactttttgttgaatctgcaagtggacatttggatagatttgaagatttctttggaaacgggaatatcttcatatcaaatctagacagaagcattttcagaaacgtctttgtgatgtttacattcaactcatagagttgaacattccgtttcagagagcagatttgaggcactctttttgtagtatgtgcaagtggatatttggagcgctctgaggcctacggtgaaaaagcaaatatcttcccataaccactagacagaaacattctcagaaactcctttatgacgtatgtactcaactaacagagaagaaccttccttttgacagagcagttttgatacactctttttgaagaatctgcaagtggatatttggatagctgtgaagatttcgttggaaacgggaatatcttcctataaaatctagacagaagcattctcagaaactgctctgtgatgtctgcattcaagtcacagagttgaacattgcctttcatagagcaggtttgaaacgctctttttgtagtatatgaaagtggatgtttcggacggttggaggcccatggtgataaagggaatatcttcccctacaagctagaaagaagcattctgtgaaacttgtttgtgatgtgtgtactcaactaacagagttgaacctttctttttacagagcagttttgaaacactctttttgtagaatctgcgaggggatatttggatagatttcacgatttcgttggaaacgggaatatcttcatagaaaatctcgacagaagcattctcagaaacttctttgtgatatgtgcattcaattcacagagttgaatattccctttcacagagtaggtttgaaacactctttttgtagtatctggaagtggacatttggagcgccttgacacctacggtgaaaagggaaatatcttcccataaaaactagacagaagcaatctcagaatcttctttgggatatatgcacgcagctaacagagttgaacctttctattgacagagcagttttgaaacactctttctgtggaatctgcaagtggatatttgcatagattggaggatttcgttggaaacgggattacgtataaaaagtagacagcagcatcctcagaaacttctttgtgatgtgtgcattcaagtcacagagttgaacattccctttcgtacagcagttttgaaacactctttctgtagtatctggaagtgaacattaggacagctttcaggtctatggtgagaaagcaaatatcttcaaataaaaactagacagaagcattctcataaacttgtttgtgatgtgtgaactcagcttacagaggtggatctttcttttgatagagcagttcggaaaaacactttttgttgaatctgcaagtggacatttggatagatttgaagatttctttggaaacgggaatatcttcatatcaaatctagagagaagcattctcagaaacgtctttgtgatgtttgcattcaactcatagagttgaacattccctttcagagagcagcttggaaacactctttttgtagtatgtgcaagtggatatttggagcgctctgaggcctacggtgaaaaagcaaatatcttcccataaacactagacagaaacattctcagaaacttctttatgacgtatgtactcaactagcagagaagaactttccttttgacagagcatttttcatacactcttttgtagtatctgcaagtggatatttcgatagctgtgaagatttcgttggaaacgggaatatcttcctataaagtctggacagaagcattctcagaaactgctctgtgatgtctgcattcaagtcacagagttgaacattgcctttcatagagcaggtttgaaacgctctttttgtagtatatggaagtggacttatcggacggtttgaggcccatggtgataaagggaatatcttcctctacaagctagaaagaagcattctgtgaaacttgtttgtgatgtgtgtactcagctaacagagttgaacctttctttttacagagcggttttgaaacactctttttgtagaatctgcaaggggatatttggatagatttcaggatttcgttggaaacgggaatatcttcatataaaatctcgacagaagcattctcagaaacttctttgtaatatgtgcattctagtcacagagttgaatattccctttcacagagtaggtttgaaacactctttttgtagtatctggaagtggacatttggagcgccttgacacctacggtgaaaagggaaatatcttcccataaaaactagacagaggcaatctcagaatcttctttgggatatatgcacgcagctaacagagttgaacctttctattgacagagcagttttgaaacagtctttctgtggaatctgcaagtggatatttggatagcttggaggatttcgttggaaacgggattacgtataaaaagtagacagcagcatcctcagaaacttctttgtgatgtgtgcattcaagtcacagagttgaacattccctttcgtacggcagttttgaaacactccttctgtagtatctggaagtgaacattaggacagctttcaggtctatggtgagaaaggaaatatcttcaaataaaaactagacagaaagcattctcataaacttgtttgtgatgtgtgaactcagctaacagaggtggatctttcttttgatagagcagttctgaaaaacacattttgttgaatctgcaagtggacatttggatagatttgaagatttcgttggaaacgggaatatcttcatatcaaatctagacagaagcattctcagaaacgtctttgtgatgtttgcattcaactcatagagttgaacattcggtttcagagagcagctttgaggcactctttttgtagtatgtgcaagtggatatttggagcgctctgaggcctagggtgaaaaagcaaatatcttcccataaccactagacagaaacattctcagaaactcctttatgacgtatgcactcacctaacagagaagaaccttccttttgacagagcagttttgatacactctttttgtggaatctgcaagtggatatttggatagctgtgaagatttcgttggaaacgggaatatcttcctataaaatctagacagaagcattctcagaaactgctctgtgatgtctgcattcaagtcacagagttgaacattgcctttcatagaggaggtttgaaacgctctttttgtagtatatggaactggatgtttcggacggttggaggcccatggtgataaagggaatatcttcccctacaagctagaaagaagcattctgtgaaacttgtttgtgatgtgtgtactcaactaacagagttgaacctttctttttacagagcagttttgaaacactctttttgtagaatctgcgaggggatatttggatacatttcagcatttcgttggaaacgggaatatcttcatataaaatttcgacagaagcattctcagaaacttctttgtgatatctgcattcaagtcacagagttgaatattccctttcacagagtaggtttgaaacactctttttgtagtatctggaagtggacatttggagcgccttgacacctacggtgaaaagggaaatatcttcccataaaaaatagacagaagcaatctcagaatcttctttgggatatatgcacgcagctaacagagttgaacctttctattgacagagcagttttgaaacagtctttctgtggaatctgcaagtggatatttggatagcttggaggatttcgttggaaacgggattaagtataaaaagtagagagcagcatcctcagaaacttctttgtgatgtgtgcattcaagtcacagagttgaacattccctttcgtacagcagttttgaaacactctttctgttgtatctggaagtgaacattaggacagctttcaggtctatggtgagaaaggaaatatcttcaaataaaaactagacagatgcattctcataaacttgtttgtgatgtctgaactcagctaacagaggtggatctttcttttgatagagcagttctgaaaaacactttttgttgaatctgcaagtggacatttggatagatttgaagatttcgttggaaacgggaatatcttcatatcaaatctagacagaagcattctcagaaacgtctttgtgatgtttgcattcaactcatagagttgaacattccgtttcagagagcagctttgaagcactctttttgtaatatgtgcaagtggatatttggagcgctctgaggcctacggggaaaaagcaaatatcttcccataaccactagacagaaacattctgagaaactcctttatgacgtatgcactcacctaacagagaagaaccttccttttgccagagcatttttgatacactctttttgtagaatctgaaagtggatatttggatagctgtgaagatttcgttggaaacgggaatatcttcctataaaatctagacagaagcattctcagaaactgctctgtgatgtctacattcaagtcacagagttgaacattgcctttcatagagcaggtttgaaacgctctttttgtagtatatggaagtggacgtatcggacggtttgaggcccatggtgataaagggaatatcttcccctacaagctagaaagaagcattgtgtgaaacttgtttgtgatgtgtgtactcaactaacagagttgaacctttcttttcacagagcagttttgaaacactctttttgtagaatctgcgagcggatatttggatagatttcaggatttcgatggaaacgggaatatcttcatataaaatctcgacagaagcattctcagaaacttctttgtgatatgtgcattcaagtcacagagttgaatattccctttcacagagtaggtttgaaacactctttttgtagtatctggaagtggacatttggagcgccttgacacctactgtgaaaagggaaatatcttcccataaaaactagacagaaacaatctcagaatcttctttgggatatatgcacgcagctaacagagttgaacctttctattgacagagcagttttgaaacagtctttctgtggaatctgcaagtgtatatttggatagcttggaggatttcgttggaaacgggattacgtataaaaagtagacagcagcatcctcagaaacttctttgtgatgtgtgcattcaagtcacagagttgaacattccctttcgtacagcagttttgaaccactctttctgtagtaactggaagtgaacattaggacagctttcaggtctatggtgagaaaggaaatatcttcaaataaaaactagacagaaagcattctcataaacttgtttgtgatgtgtgaactcagctaacagaggtggatctttcttttgatagagcagttctgaaaaacactttctgttgaatctgcaagtggacatttggatagatttgaagatttcgttggaaacgggaatatcttcatatcaaatctagacagagcattctcagaaacgtctttgtgatgtttgcattgaactcatagagttgaacattccctttcagagagcagctttgaagcactctttttgtagtatgttcaagtggacatttggagcgctctgaggcctatggggaaaaagcaaatatcttcccataacaactagacagaaacattctcagaaacttctttatgacgtatgtactcaactagcagaaaagaactttccttttgacagagcttttttgatacactctttttgtagtatctgcaagtggatatttggatagatgtgaagatttcgttggaatcgggaatatcttcctataaagtctggacagaagcattctcagaaactgctctgtgatgtctgcattcaagtcacagagttgaacattgcctttcatagagcaggtttgaaacgctctttttgtagtatatggaagtggacttatcggacggtttgaggcccatggtgataaagggaatatcttcccctacaacctagaaagaagcattctgtgaaacttgtttgtgatgtatgtactcaactaacagagttgaacctttctttttacagagcagttttgaaacactctttttgtagaatctgcgaggggatatttggatacatttcaggatttcgttggaaacgggaatatcttcatataaaatctcgacagaagcattctcagaaacttctttgtgatatctgcattcaagtcacagagttgaatattccctttcactgagtaggtttgaaacactctttttgtagtatctggaagtggacatttggagcgccttgacgcctacggtgaaaagggaaatatcttcccataaaaactaggcagaagaaatctccgaatcttctttgggatatatgcacgcagctaacagagttgaacctttctattgacagagcagttttgaaacagtctttctgtggaatctgcaagtggatatttggatagcttggaggatttcgttggaaaagggattatgtataaaaattagacagcagcatcctcagaaacttctttgtgatgtgtgcattcaagtcacagagttgaacattccctttcatacagcagttttgaaacgctctttctgtagtatctggaagtgaactttaggacagctttcaggtctatggtgagaaaggaaatatcttcaaataaaaactagacagaagcattctcataaacttgtttgtgatgtctgaactcagctaacaggaggtggatctttcttttgatagagcagttctgaaaaacacttttttttgaatctgcaagtggacatttggatagatttgaagatttcgttggaaacgggaatatcttcatatcaaatctagacagaagcattctcagaaacgtctttgtgatgtttgcattcaactcatagagttgaacattccctttcagagagcagctttggagcactctttttgtagcatgtgcaagtggacatttggagcgccctgaggcctacggggaaaaagcaaatatcttcccataaccactagacagaaacaatctcagaaacttctttatggcgtatgtactcaactagcagagaagaactttccttttgacagagcacttttgatacactctttttgtagtatctgcaagtggatatttggatagctgtgaagatttcgttggaatcgggaatatattcctataaagtccggacagaagcattctcagaaactgctctgtgatgtctgcattcaagtcacagagttgaacattgcctttcatacagcaggtttgaaacgctctttttgtagtatatggaagtggatgtttccgacggttggaggcccatggtgataaagggaatatcttcccctacaagctagaaagaagcattctgtgaaacttgtttgtgatgtgtgtactcaactaacagagttgaacctttcttttcacagagcagttttgaaacactctttttgtagaatctgcgaggggatatttggatagatttcaggatttcgttggaaacgggaatatcttcatttaaaatctcgacagaagcattctcagaaacgtctttgtgatatgtgcattcaagtcacagagttgaatattccctttcacagagtaggtttgaaacactctttttgtagtatctggaagtggacatttggagcgccttgacgcctacggtgaaaagggaaatatcttcccataaaaactagacagaagcaatctcagaatcttctttgggatatatgcacgcagctaacagagttgaacctttctattgacagagcagttttgaaacagtctttctgtggaatctgcaagtggatatttggatagcttggaggatttcgttggaaacgggattacgcataaaaagtagacggcaccatcctcagaaacttctttgtgatgtgtgcattcaagtcacagagttgaacattccctttcgtacagctgttttgaaacactctttctgtagtaactggaagtgaacattaggacagctttcaggtctatggtgagaaaggaaatatcttcaaataaaaactagacagaagcattctcataaacttgtttgtgatgtgtgaactcagctaacagaggtggatctttcttttgatagagcagttctgaaaaacactttttgttgaatctgcaagtggacatttggatagatttgaagatttcgttggaaacgggaatatcttcatattaagtctagacagaagcattctcggaaacgtctttgtgatgtttgcattcaactcatagagttgaacattccgtttcagagagcagctttgaagcactctttttgtagtatgtgcaaggggatatttggagcgctctgaggcctaaggtgaaaaagcaaatatcttcccataaccactagacagaaacattctcagaaactcctttatgacggtatgcactcacctaacagaaaataaccttccttttgacagagcagtttagatacactctttttgtagaatctgcaagtggatatttggatagctgtgaagatttcgttggaaacgggaatatcttcctataaaatctagacagaagcattctcagaaactgctctgtgatgtctgcattcaagtcacagagttgaacattgcctttcatagagcaggtttgaaacgctctttttgtagtatatagaagtggacttatcggacggtttgaggcccatggtgataaagggaatatcttcccctacaagctagaaagaagcattgtgtgaaacttgtttgtgatgtgtgtactcaactaacagagttgaacttttctttttacagagcagttttgaaacactctttttgtagaatctgcgaggggatatttggatagatttcaggatttcgttggaaacgggaatatcttcatataaaatctcgacagaagcattctcagaaacttctttgtgatatgtgcattcaagtcacagagttgaatattccctttcacagagtaggtttgaaacactctttttgttgtatctggaagtggacatttggagcgccttgacacctacggtgaaaagggaaatatcttctcataaaaagtagacagaagtaatctcagaaacttctttgggatatatgcacgcagctaacagagttgaacctttctattgacagagcagttttgaaacagtctttctgtggaatctgcaagtgaatatttggatagcttggaggatttcgttggaaacgggattacgtataaaaagtagacagcagcatcctcagaaacttctttgtgatgtgtgcattcaagtcacagagttgaacattccctttcgtacagcagttttgaaacactctttctgtagtatctggaagtgaacattaggacagatttcaggtctatggtgagaaaggaaatatcttcaaataaaaactagacagaagcattctgataaacttgtttgtgaagtgtgatctcagctaacagaggtggatctttctttttatagagcagttctgaaaaacactttgttgaatctgcaagtggacatttggatagatttgaagatttcgttggaaacgggaatatcttcatatcaaatctagacagaagcattctcagaaacgtctttgtgatgtttgcattcaactcatagagttgaacattccgcttcagagagcagctttgaagcactctttttgtagcatgtgcaagttgacatttggagcgctcagaggcctacggggaaaaagcaagtatcttcccataaccactagacagaaacattctcagaaactccattatgacgtatgcactcaactaacagagaacaaccttccttttgacagagcagttttgatacactctttttgtagaatctgcaagtggatatttggatagctgtgaagatttcgttggaaacgggaatatcttcctataaaatctagacaggcagcatcctcagaaactgctttgtgatatctgcattcaagtcacagagttgaacattccctttcatggagcaggtttgaaatgctctttttgttacatgtggaagtggacgtttcgaacggtttgagacccatggtgataaaggaaatatcttcccccacaagctaagaagagcattctgtgaaacttgtttgtgatatgtgtactcaactaacatagttgaacctttctttttacagagcagttttgaaacactctttttgtagaatctgcgaggggatatttggatagatttcaggatttcgttggaaacgggaatatcttcatataaaatctcgaaagaagcattctcagaaacttctttgtgatatgtgcattcaagtcacagagttgaatattccctttcacagagtaggtttgaaacactctttttgtagtatctggaagtggatatttggagcgccttgacacctacggtgaaaagggaagtatcttcccatcaaaactagacagaagcaatctcagaatctcctttgggatatatgcacgcagctaacagagttgaacctttctattgacagagcagttttgaaacagtctttctgtggaatctgcaagtggatatttggatagcttggaggatttcgttggaaacgggattacgtataaaaactagacagcagcatcctcagaaacttctttgtgatgtgtgcattcaagtcacagagttgaacattccctttcgtacagcagttttgaaacactctttctgtagtatctggaagtgaacattaggacagctttcaggtctatggtgataaaggaaatatcttcaaataaaaactagacagaagcattctcataaacttgtttctgatgtgtgaactcagctaacagaggtggatctttcttttgatagagcagttctgaaaaacactttttgttgaatctgcaagtggatatttggatagatttgaagatttcgttggaaacgggcatatcttcatatcaaatctagacagaagcattctcagaaacgtctttgtgatgtttgcattcaactcatagagttgaacattccgtttcagagagcagctttgaggcactctttttgtagtatgtgcaagtggatatttggagcgctctgaggcctacggtgaaaaagcaaatatcttcccataaccactagtcagaaacattctcagaaactcctttatgacgtatgtactcaactagcagagaagaactttccttttgacagagcatttttgatacactctttttgtactatctgcaagtggatatttggatagctgtgaagatttcgttggaaacgggaatatcttcctataaagtctggacagaagcattctcagaaactgctctgtgatgtctgcattcaagtcacagagttgaacattgcctttcatacagcaggtttgaaacgctctttttgtagtatagggaagtggacttttcggacggtttgaggaccacgatgataaaggggaatcttcccctacaagctagaaagaagcattctgtgaaacttgtttgtgatgtgtgtactcaactaacagagttgaacctttctttttacagagcagttttgaaacactctttctgtagaatctgtgaggggatatttggatagatttcaggatttcggtggaaacgggaatatcttcatataaaatctcgacagaagcattctcagaaacttctttgtgatatgtgcattcaaatcactgagttgaatattccctttcacagagtaggtttgaaacactctttttgtagtatctggaagtggacatttggagcgccttgacgcctacggtgaaaagggaaatatcttcccataaaaactagacagaagcaatctcagaatcttctttgggatatatgcacgcagctaacagagttgaacctttctattgacagagcagttttgaaacagtctttctgtggaatctgcaagtggatatttggatagcttggaggatttcgttggaaacgggattaagtataaaaagtacacagcagcatcatcagaaacttctttgtgatgtgtgcattcaagtcacagagttgaacattccctttcgtacagcagttttgaaacactctttctgtagtatctggaagtgaacattaggacagctttcagctctatggtgagaaaggaaatatcttcaaataaaaactagacagaagcattctcataaacttgtttgtgatgtgtgaactcagctaacagacgtggatctttcttttgatacagcagttttgaaaaacactttttgttgaatctgcaagtggacatttggatagatatgaagatttcgttggaaacgggaatatcttcatatcaaatactagacagaagcattctcagaaacgtctttgcgatgtttgcattcaactcatagagttgaacattccgtttcagagagcagctttgaggcactctttttgtagtatgggcaagtggatatttggagcgctctgaggcctacggtgaaagagcaaatatcttcccataaccactagacagaaacattctcagaaactcctttatgacgtatgcactcacctaacagagaagaaccttccttttgacagagcagttttgatacactctttttgtagaatctgcaagtggatattcggatagctgtgaagatttcgttggaaacgggaatatcttcctataaaatctagacagaagcattctcagaaactgctctgtgatgtctgcattcaagtcacagagttgaacattgcctttcatagagcaggtttgaaacgctctttttgtagtatattgaagtggacgtttcggacggtttgaggcccatggtgataaagggaatatcttcccctacaagctagaaagaagcattctgtgaaacttgtttgagatgtgtgtactcaactaacagagttgaacctttctttttacagagcagttttgaaacactctttttgtagaatctgcgaggggatatttggatagatttcaggatttcgttggaaacgggaatatcttcatataaaatctcgacagaagcattctcagaaacttctttgtgatatgtgcattcaagtcacagagttgaatattccctttcacagagtaggtttgaaacactctttttgtagtatctggaagtggacatttggagcgccttgacacctacggtgaaaagcgaaatatcttcccataaaaactagacagaagcaatctcagaatcttctttgggatatatgcacgcagctaacagaagttgaacctttctattgacagagcagttttgaaacagtctttctgtggaatctgcaagtggatatttggatagcttggaggatttcgttggaaacgggattacgtataaaaagtagacagcagcatcctcagaaacttctttgtgatgtgtgcattcaagtcacagagttgaacattccctttcgtacagcagttttgaatcactctttctgtagtaactggaagtgaacattaggacagctttcaggtctatggtgagaaaggaaatatcttcaaataaaaactagacagaagcattctcataaacttgtttgtgatgtgtgaactcagctaacagaggtggatctttcttttgatagaacagttctgaaaaacactttttgttgaatctgcaagtggacatttggatagattagaagatttcgttggaaacgggaatatcttcatatcaaatctacacagaagcattctcagaaaggtctttgtgatgtttgcattcaactcatagagttgaacattccctttcagagagcagctttgaagcactctttttgtagtatgtgcaaggggatatttggagcgctctgaggcctaaggtgaaaaagcaaatatcttcccataaccactagacagaaacattctcagaaactcctttatgacgtgtgcactcacctaacagagaagaaccttccttttgacagagcatttttgatacactctttttgtagaatctgcaagtggatatttggatagctgtgaagatttcgttggaaacgggaataccttccaataaaatctagacagaagcattctcagaaactgctctgtgatgtctgcattgaagtcacagagttgaacattgcctttcatagagcaggtttgaaacgctctttttgtagtatatggaagtggacgtttcggacggtttgaggcccatggtgataaagggaatatcttcccctacaagctagaaagaagcattctgtgaaacttgtttgtgatgtgtgtactcagctaacagagttgaacctttctttttacagagcagttttgaaacactctttttgtagaatctgcgaggggatatttggatagatttcaggattttgttggaaacgggaatatcttcatataaaatctcgacagaagcattcttagaaacttctttgtgatatctgcattcaagtcacagagttgaatattccctttcacagagtaggtttgaaacactctttttgtagtatctggaagtggacatttggagcgccttgacgcctacggtgaaaagggaaatatcttcccataaaaactagacagaagcaatatcagaatcttctttgggatatatgcacgcagctaacagagttgaacctttctattgacagagccgttttgaaacagtctttctgtggaatctgcaagtggatatttggatagcttggaggatttcgttggaaacgggattacgtataaaaagtagacagcagcatcctcagaaacttctttgtgatgtgtgcattcaagtcacagagttgaacattccctttcgtacagcagttttgaaacactctttctgtagtatctggaactgaacattaggacagctttcaggtctatggtgagaaaggaaatatcttcaaataaaaactagacagaaagcattctcataaacttgtttgtgatgtgtgaactcagctaacacacgtggatctttcttttgatagagcagttctgaaaaacactttttgttgaatctgcaagtggacatttggatagatttgaagatttcgttggaaacgggaatatcttcatatcaaatctagacagaagcattctcagaaacgtctttgtgatgttagcattcaactcatagagttgaacattccctttcagagagcagctttgaagcactctttttgtagtatgtgcaagtggatatttggagcgctctgaggcctatggtgaaaaagcaaatatcttcccattaccactagacagaaacattctcacaaactcctttatgacgtatgcactcacctaacagagaagaaccttccttttgacagagcacttttgatacactctttttgtagaatctgaaagtggatatttggatagctgtgaagttttcgttggaaacgggaatatcttcctataaattctagacagaagcattctcagaaactgctctgtgatgtctgcattcaagtcacagagttgaacattgcctttcatagagcaggtttgaaacgctctttttgtagtatatggaagtagacgtttcggacggtttgaggcccatggtgataaagggaatatcttcccctgcaagatagaaagaagcattctgtgaaacttgtttgtgatgtgtgtactcaactaacagagttgaacctttctttttacagagcagttttgaaacactctttttgtagaacctgcgagcggatatttggatagatttcaggatttcgttggaaacgggaataccttcatataaaatctcgacagaagcattctcagcaaacttctttgtgatatgtgtattcaagtcacagagttgaatactccctttcacagagtaggtttgaaacactctttttgtagtatctggaagtggacatttggagcgccttgacgcctacggtgaaaagggaaatatcttcccataaaaactagacagaagtaatcgcagaatcttctttgggatatatgcacgcagctaacagagttgaacctttctattgacagagcagttttgaaacagtctttctgtggaatctgcaattggatatttggatagcttggaggatttcgttggaaacgggattacgtataaaaagtagacagcagcatcctcagaaacttctttgtgatgtgtgctttcaagtcacagagttgaacattccctttcgtacagcagttttgaaaaactctttctgtagtatctggaagtgaacattaggacagctttcagctctatggtgagaaaggaaatatcttcaaataaaaactagacagaagcattctcataaacttgtttgtgatgtgtgaactcagctaacagaggtggatctttcttttgatatagcagttttgaaaaacactttttgttgaatctgcaagtggacatttggatagatttgaagatttcgttggaaacgggaatatcttcatatcaaatctagacagaagcattctcagaaacatctttgtgatgtttgcattcaactcatagagttgaacattccgtttcagagagcagctttgaagcactctttttgtagcatgcgcaagtggacatttggagcgctctgaggcctacggggaaaaagcaaatatcttcccataaccactagacagaaacattctcagaaactcctttatgacgtatgcactcacctaacagagaagaaccttccttttgacagagcagttttgatacactctttttgtagcatctgcaagtggatatttggatagctgtgaagatttcgttggaaacgggaatatcttcctataaaatctagacagaagcattctcagaaactgctctctgatgtctgcattcaagtcacagagttgaacattgcctttcatagagcaggtttgaaatgctctttttgtagtatatggaagtggacgtttcagacggtttgagtcccatggtgataaagggaatatcttcccctacaagctagaaagaagcattctgtgaaacttgtttgtgatgtgtgtactcaactaacagagttgaacctttcttttcacagagcagttttgaaacactctttttgtagaatctgcgaggggatatttgggatagatttcagcatttcgttggaaacgggaatatcttcatataaaatctcgacagaagcattctcagaaacttccttgtgatatgtgcattcaagtcacagagttgaatattccctttcgcagagtaggtttgaaacactctttttgtagtatctggaagtggacatttggagcgccttgacgcccacggtgaaaagggaaatatcttcccatcaaaactagacagaagcaatctcagaatcttctttgggatatatgcacgcagctaacagagttgaacctttctattgacagagcatttttgaaacagtctttctgtggaatctgcaagtggatatttggatagcttggaggatttcgttggaaacgggattacgtataaaaagtagacagcagcatcctcagaaacttctttgtgatgtgtgcattcaagtcacagatttgaacattccctttcgtacagcagttttgaaacactctttctgtagtatctggaagtgaacattaggacagctttcaggtctatggtgagaaaggaaatatcttcaaataaaaactagacagaagcattctcataaacttgtttgtgatgtgtgaactcagctaagagaggtggatctttcttttgatacagcagttttgaaaaacactttttgttgaatctgcaagtggacatttggatagatttgaagatttcgttggaaacgggaatatcttcatatcaaatctagacagaagcattctcagaaacgtctttttgatgtttgcattcaactcatagagttgaacattccctttcagagagcagctttgaagcactctttttgtagcatgtgcaagtggacatttggagcgccctgaggcctacggggaaaaagcaaatatcttcccataaccactagacagaaacattctcagaaacttctttatgacgtatgtactcaactagcagagaagaactttccttttgacagagcttttttgatacactctttttgtagtatctgcaagtggatatttggatagctgtaaagatttcgttggaatcgggaatatcttcctataaagtcaggacagaagcattctcagaaactgctctgtgatgtctgcattcaagtcacagagttgaacattgcctttcatagagcaggtttcagacactcttttgttagtatatggaagtggacgtttcggacggtttgaggcccatggtgataaaggaaatttcttcccctacaagctagaaagaagcattctgtgaaacttgtttgtgatgtgtgtactcaactaacagagttgaacctttctttttacagagcagttttgaaacactctttttgtagaatctgcgaggggatatttggatagatttcaggatttcgttggaaacgggaatatattcatataaaatctcgacagaagaattctcagaaacttctttgtgatatgtgcattcaagtcacagagttgaatgttccctttcacagagtaggtttgaaacactctttttgtagtatctggaagtggacatttggagcgccttgacacctacggtgaaaagggaaatatcttctcataaaaagtagacagacgcaatctcagaatcttctttgggatatatgcacgcagctaacagagttgaacctttctattgacagagcagttttgaaacagtctttctgtggaatctgcaagtggatatttggatagcttggaggatttcgttggaaacgggattacgtataaaaaatagactgcagcatcctcagaaacttctttgtgatgtgtgcattcaagtcacagagttgaacattccctttcgtacagcagttttgaaacactctttctgtagtaactggaagtgaacattaggacagctttcagctctatggtgagaaaggaaatatcttcaaataaaaactagacaaaagcattctcataaacttgtttttgatatgtgaactcagctaacagaggtggatctttcttttgatagagcagttctgaaaaacactttttgttgaatctgcaagtggacatttggatagatttgaagatttcgttggaaacgggaatatcttcatatcaaatctagacacaagcattctcagaaacgtctttgtgatgtttgcattcaactcatagagctgaacattccgtttcagagagcagctttgaagcactctttttgtagtatgtgcaagtggatatttggagcgctctgaggcctacggtgaaaaagcaaatatcttcccataaccactagacagaaacattctcagaaacttctttatgacgtatgtactcaactagcagagaagaactttccttttgacagagcttttttgatacactctttttgtagtatctgcaagtggatattgggatagctgtgaagatttcgttggaatcgggaatatcttcctataaagtctggacagaaagcattctcagaaactgctctgtgatgtctgcattcaagtcacagagttgaacgttgcctttcatagagcaggtttgaaacgctctttttgtagtatatggaagtggacttatcggacggtttgaggcccatggtgataaagggaatatcttcccctacaagctagaaagaagcattctgtgaaacttgtttgtgatgtgtgtactcaactaacagagttgaacctttcttttcacagagcagttttgaaacactctttttgtagaatctgcgaggggatatttggatagatttcaggatttcgttggaaacgggattatcttcatataaaatctcgacagaagaattctcagaaacttccttgtgatatgtgcattcaagtcacagagttgaatattccctttcacagagtaggtttgaaacactgtttttgtagtatctggaagtggacatttggagcgccttgacgcctacggtgaaaagggaaatatcttcccataaaaactagacagaagcaatctcagaatcttctttgggatatatgcacgcagctaacagagttgaacctttctattgacagagcagttttgaaacagtctttctgtggaatctgaaagtggatatttggatagcttggaggatttcgttggaaacgggattacgtataaaaagtagacagccagcatcctcagaaacttctttgtgatgtgtgcattcaagtcacagagttgaacattccctttcgtacagcagttttgaaacactctttctgtagtaactggaagtgaacattaggacagctttcaggtctatggtgagaaaggaaatatcttcaaataaaaactagacagagcattctcataaacttgtttgtgatgtgtgaactcatctaacagacgtggatctttcttttgatacagcagttttgaaaaacactttttgttgaatctgcaagtggacatttggatagatatgaagatttcgttggaaacgggaatatcttcatatcaaatctagacagaagcattctcagaaacgtctttgcgatgtttgcattcaactcatagagttgaacattccgtttcagagagcagctttgaggcactctttttgtagtatgtgcaagtggatatttggagcgctctgaggcctacggtgaaaaagcaaatatcttcccataacaactagatagaaacattctcagaaactcctttatgacgtatgcactcacctaacagaaaagaaccttccttttgacagagcagttttgatacactctttttgtagaatctgcaagtggatatttggatagctatgaagatttggttggaaacgggaatatcttcctataaaatctagacagaagcattctcagaaactgctctgtgatgtctgcattcaagtcacagagttgaacattgcctttcatagagcaggtttgaaactctctttttgtagtatatggaagtggacttatcggacggtttgaggcccatggtgataaagggaatatcttcccctacaagctagaaagaagcattctgtgaaacttgtttgtgatgtgtgtactcaactaacagagttgaacctttctttttacagagcagttttgaaacactcttttgtagaatctgtgaggggatatttggatagatttcaggatttcgttttaaacgagaatatcttcatataaaatctcgacagaagcattctcagaaacttctttgtgatatctgcattcaagtcacagagttgaatattccctttcacagagtaggtttgaaacactctttttgtagcatctgcaagtggacatttggagcaccttgacacctatggtgaaaagggaaatatcttccgataaaaactagacagaagcaatctcagaatcttctttgggatatatgcacgcagctaacagagttgaacctttctattgagagagcagttttgaaacagtctttctgtggaatctgcaagtggatatttggatagcttggaggatttccttggaaacgggattacgtataaaaagtagacagcagcatcctcagaaacttctttgtgatgtgtgcattcaagtcacagagttgaacattccctttcgtacagcagttttgaaacactctttctgtagtatctggaagtgaacattaggacagcttccaggtctatggtgagaaaggaaatatcttcaaataaaaactagacagaagcattctcataaacttgtttgtgatgtgtgtactcagctaacagaggtggatctttcttttgatagagcagttttgaaaaacactttttgttgaatctgcaagtggacatttggatagatttaaagatttcgttggaaacgggaatatcttcatatcaaatctagacagaagcattctcagaaacgtctttgtgatgtttccattcaactcatagagttgaacattcactttcagagagcagctttgaagcactctttttgtagtatgtgcaagtggatattttgatcgctctctggcctacggtgaaaaagcaaatatcttcccataaccactagacagaaacattctcagaaactcctttatgacgtatgcactcacctaacagaaaagaaccttccttttgacagagcagttttgatacactctttttgtagaatctgcaagtggatatttggatagctatgaagatttggttggaaacgggaatatcttcctataaaatactagacagaagaattctcagaaactgctctgtgatgtctgcattcaagtcacagagttgaacattgcctttcatagagcaggtttgaaacgctctttttgtagtatatggaagtggatgtttcggacggttggaggcccatggtgataaagggaatatcttcccctacaagctagaaagaagcattctgtgaaacttgtttgtgatgtgtgtactcaactaacagagttgaacctttctttttacagagcagttttgaaacactctttttgtagaatctgcgaggggatatttggatagatttcaggatttcgttggaaacgggaatatcttcatataaactctcgacagaagcattctcagaaacttctttgtgatatctgcattcaactcacagagttgaatattccctttcgcagagtaggtttgaaacactctttttgtagtatctggaagtggacatttggagcgccttgacgcctacggtgaaaagggaaatatcttcccataaaaactagacagaagcaatctcagaatcttctttgggatatatgcacgcagctaacagagttgaacatttctattgacagagcagttttgaaacaatctttctgtggaatctgcaagtggatatttggatagcttggaggatttcgttggaaacgggattacgtataaaaagtagacagcagcatcctcagaaactactttgtgatgtgtgcattcaagtcacagagttgaacattccctttcgtacagcagttttgaaacactctttctgtagtatctggaagtgaacattaggacagctttcaggtctatagtgagaaaggatatatcttcaaataaaaactagagagaagcacttttaaaaacttgtttgtgatgtgtgaactcaactaacagaggtggatctttctttcgatacagcagttttgaaaaacactttttgttgaatctgcaagtggacatttggatagattggaagatttctttggaaacgggaatatcttcatatcaaatctagacagaagcattctcagaaacgtctttgcgatgtttgcattcaactcatagagttgaacattccgtttcagagagcagctttgaggcactctttttgtagtatgtgcaagtggatatttggagcgctctgaggcctacggtgaaaaaacaaatatcttcccataaccactagacagaaacattctcagaaactcctttatgacgtttgtactcaactaacagagaagaaccttccttttgacagagcagttttgatacactctttttgtagaatctgcaagtggatatttggatagctgtgaagatttcgttggaaacgggaatatcttcctataaagtctggacagaagcattctcagaaactgctctgtgatgtctgcattcaagtcacagagttgaacattgcctttcatggagcaggtttgaaacgctctttttgtagtatatggaagtggacttatcggacggtttgaggcccacggtgataaagggaatatcttcccctacaagctagaaagaagcattctgtgaaacttgtttgtgatgtgtgtactcaactaacagagttgaacctttctttttacagagcagttttgaaacactctttttgtagaatctgcgaggggatatttggatagatttcaggatttcgttggaaacgcgaatatcttcatataaaatctcgacagaagcattctcagaaacttctttgtgatatctgccttcaagtcacagagttgaatattccctttcacagagtaggtttgaaacactctttttgtagtatctggaagtggacatttggagtgccttgacgcctacggtgaaaagggaaatatcttcccataaagctagacagaagcaatctcagaatcttctttgggatatatgcacgcagctaacagagttgaacctttctattgacagagcagttttgaaacagtgtttctgtggaatctgcaagtggatatttggatagcttggaggatttcgttggaaacgggattaagtataaaaagtagacagcagcatcctcagaaacttctttgtgatgtgtgcattcaagtcacagagttgaacattccctttcgtacagcagttttgaaacactctttctgtagtaactggaagtgaacattaggacagctttcaggtctatggtgagaaaggaaatatgcttcaaataaaaactagacagaagcattctcataaacttgtttgtgatgtgtgaactcaggtaacagacgtggatctttcttttgatagagcagttttgaaaaacactttttgttgaatctgcaagtggacatttggatagatttgaagatttcgttggaaacgggaatatcttcatatcaaatctagacagaagcattctcggaaacgtctttgtcatgtttgcattcacctcatagagttgaacattccgtttcagagagcagctttgaagcactctttttgtagtatgtgcaaggggatatttggagcgctctgaggcctaaggtgaaaaagcaaatatcttcccataaccactagacagaaacattctcagaaactcctttatgacgtatgtactcaactaacagagaagaaccttccttttgacagagcagttttgatacactctttttgtagaatctgcaagtggatatttggatacctgtgaagatttcgttggaaacgggaatatcttcctataaaatctagacagaagcattctcagaaactgctctgtgatgtctgcattcaagtcacagagttgaacattgcctttcatagagcaggtttgaaatgctctttttgtagtatatggaagtggacgtttcagacggtttgaggtccatggtgataaagggaatatcttcccctacaagctagaaagaagcattctgtgaaacttgtttgtgatgtgtgtagtcaactaacagagttgaacctttctttttacagagcagttttgaaacactctttttgtagaatctgcgaggggatatttggatagatttcaggatttcattggaaaggggaatatcttcatataaaatctcgacagaagcattctcagaaacttccttgtgatatgtgcattcaagtcacagagttgaatattccctttcacagagtaggtttgaaacactctttttgtagtatctggaagtggacatttggagcgcctggatgcctacggtgaaaagggaaatatcttcccataaaaactagacagaagcaatctcagaatcttctttgggatatatgcacgcagctaactgagttgaacctttctattgacagagcagttttgaaacattctttctgtggaatctgcaagtggatatttggatagcttggaggatttcgttggaaacaggattacgtataaaaagtagacagcagcatcctcagaaacttctttgtgatgtgtgcattcaagtcacagagttgaacatttcctttcgtacagcagttttgaaacactctttctgtagtatctggaagtgaacattaggacagctttcagctctatggtgagaaaggaaatatcttcaaataaaaactagacagaaagcattctcataaacttgtttgtgatgtgtgaactcagctaacaacggtggatctttcttttgatagagcagttctgaaaaacactttttgttgaatctgcaagtggacatttggatagttttgaagatttccttggaaaagggaatatcttcatatcaaatctagacagaagcattctcagaaacgtctttgtgatgttagcattcaactcatagagttgaacattccatttcagagagcagctttgaggcactctttttgtagtatgtgcaagtggatatttggagcgctctgaggcctacggtgaaaaagcaaatatcttcccataaccactagacagaaacattctcagaaactcctttatgacgtatgtactcaactaacagagaagaaccttccttttgacagagaagttttgatacactctttttgtagaatctgcaagtggatatttggatagctgtgaagatttcgttggaaacgggaatatcttcctataaaatctagacagaagcattctcagaaactgctctgtgatgtctgcattcatgtcacagagttgaacattgcctttcatagagcaggtttcaaacactctttttttagtatatggaagtggacgtttcggacggtttgaggcccaaggtgatacagggaatatcttcccctacaagctagaaagaatcattctgtgaaacttgtttgtgatgtgtgtactcaactaacagagttgaacctttctttttacagagcagtattgaaacactctttttgaagaatctgcgaggggatatttgaatagatttcaggatttcgttggaaacgggaatatcttcatataaaatctcgacagaagcattctcagaaacttcattgtgatatctgcattcaagtcacagagttgaatattccctttcacagagtaggtttgaaacactctttttgtagtatctgtaagtggacatttggagcgcctttacacctacggtgaaaagggaaatatcttcccataaaaactagacagaagcaatctcagaatcttctttgtgatatatgcacgcagctaacagagttgaacctttctattgacagagcagttttgaaacactctttctgtggaatctgcaagtggatatttgcatagattggaggatttcgttggaaacgggattacgtataaaaagtagacagcagcatcctcagaaacttctttgtgatgtgtgcattcaagtcacagagttgaacattccctttcgtacagcagttttgaaacactctttgtgtagtatctggaagtgaacattaggacagctttcaggtctatggtgagaaaggaaatatcttcaaataaaaactagacagaagcattctcataaacttgtttgtgatgtgtgaactcagctaacagaggtggatctttcttttgatagagcagttctgaaaaacactttttgttgaatctgcaagaggacatttggatagatttgaagatttcgttggaaacgggaatatcttcatatcaaatctagacagaagcattctcagaaacgtctttgtgatgtttgcattcaacacatagagttgaacattccctttcagagagcagctttgaagcactctttttgtagcatgtgcaagtggacatttggagcgccctgaggcctacggggaaaaagcaaatatcttcccataaccactagacagaaacattctcagaaactcctttatgacgtatgcactcacctaacagaaaagaaccttccttttgacagagctgttttgatacactctttttgtagaatctgcaagtggatatttggatagctgtgaagatttcgttggaaacgggaatatcttcctataaaatctagacagaagcattctcagaaactgctctgtgatgtctgcattcaagtcacagagttgaacattgcttttcctagagcaggtttgaaacgctctttttgtagtatatggaagtggacgtttcggacggtttgaggcccatggtgataaagggaatatctttccctacaagctagaaagaaccattctgtgaaacttgtttgtgatgtgtgtactcaactaacagagttgaacctttctttttacagagcagttttgaaacactctttttgtagaatctgcgaggggatatttggatacatttcaggatttcgttggaaacgggaatatcttcagtatcaaaatctcgatcagaagcattctcagaaacttccttgtgatatgtgcattcaagtcacagtagttgaatattccctttcacagagtaggtttgaaacactctttttgtagtatctggaagtggacatttggagcgccttgacgcctacggtgaaaagggaaatatcttcccataaaaactagacagaagcaatctcagaatcctctttaggatatatgcacgcagctaacagagttgaacctttctattgacagagcagttttgaaacagtctttctgtggaatctgcaagtggatatttggatagcttggaggatttcgttggaaacgggattacgtataaaaagtagacagcagcatcctcagaaactactttgtgatgtgtgcattcaagtcacagagttgaacattccctttcgtacagcagttttgaaacactctttctgtagtatctggaagtgaacattaggacagctttcagctctatggtgagaaaggaaatatcttcaaataaaaactagacagaagcattctcataaacttgtttgtgatgtgtgaactcagctaacagaggtgaatctttcttttgatagagcagttctgaaaaacactttttgttgaatctgcaagtggacatttggatagatttgaagatttcgttggaaacgggaatatcttcatatcaaatactagacagaagcattctcagaaacgtctttgtgatgtttgcattcaactcatagagttgaacattccgtttcagagagcagctttgaggcaccctttttgtagtatgtgcaagtggatatttggagcgctctgaggcctacggtgaaaaagcaaatatcttcccataaccactagacagaaacattctcagaaactcctttatgacgtatgcactcacctaacagaggagaaccttccttttgacagagcagttttgatacactctttttgtagaatctgcaagtggatatttggatagctgtgaagatttcgttggaaacgggaatatcttcctataaaatctagacaggaagcattctcagaaactgctctgtgatgtctgcattcaggtcacagagttgaacattgcctttcatagagcaggtttcaaacactctttttttagtatatggaagtggacgattcggacggtttgaggaccatggtgataaaggaaatatcttcccctacaagctagaaagaagcattctgtgaaacttgtttgtgatgtgtgtactcaactaacagagttgaacctttctttttacagagcagtttcgaaacactctttttgtagaatctgcgaggggatatttggatagatttcaggatttcgttggaaacgggagtatcttcatataaaatctcgacagaagcattctcagaagcttctttgtgatatgtgcattcaagtcacagagttgaatcttccctttcacagagtaggtttgaaacactctttttgtagtatctggaagtggacatttggagcgccttgacgcctacggtgaaaagggaaatatcttctcataaaaagtagacacaagcaatctcagaatcttctttgggatatatgcacgcagctaacagagttgaacctttctattgacagagcagttttgaaacagtctttctgtggaatctgcaagtggatacttggatagcttggaggatttcgttggaaacgggattacgtataaaaagaagacagcagcatcctcagaaacttctttgtgatgtgtgcattcaagtcacagagttgaacattccctttcgtacagcagttttgaaacactccttctgtagtatctggaagtgaacattaggacagctttcaggtctatggtgagaaaggaaatatcttcaaataaaaactagacagaagcattctcataaacttgtttctgatgtgtgaactaagctaacagaggtggatctttcttttgatagagcagttctgaaaaacactttttgttgaatctgcaagtggacatttggatagatttgaagatttcgttggaaacgggaatatcttcatatcaaatctagacagaagcattctcagaaacgtctttgtgatgtttgcattcaactcatagagttgcacattccgtttcagagagcagctttgaggcactctttttgtagtatgtgcaagtggatatttggagcgctctgaggcctacggtgaaaaagcaaatatcttcccataaccactagactgaaacattctcagaaactcctttatgacgtatgtactcaactaacagaggagaacattccttttgacagagcagttttgatacactctttttgtagaatctgcaagtggatatttggatagcttggaagatttcgttggaaaagggaatatcttcctataaaacctagacagaagcattctcagaaactgctctgtgatgtctgcattcaagtcacagagttgaacattgcctttcatagagcaggtttgaaacgctctttttgtagtatatggaagtggacgtttcagacggtttgaggcccatggtgttaaagggaatatcttgccctacaagctagaaagaagcattctgtgaaacttgtttgtgatgtgtgtactcaactaacagagttgaacctttctttttacagagcagttttgaaacaatctttttgtagaatctgcgaggggatatttggatagatttcaggatttcgttggaaaggggaatatcttcatataaaatctcgacagaagcattctcagaaacttccttgtgatatgtgcattcaagtcacagagttgaatattccctttcacagagtaggtttgaaacactctttttgtagtatctggaagtggacatttggagcgccttgacgcctacggtgaaaagggaaatatcttcccttaaaaactacacagaagcaatctcagaatcttctttgggatatatgcacgcagctaagagagttgaacctttctattgacagtgcagttttgaaatagtctttctgtggaatctgcaagtagatatttggatagcttggaggatttcgttggaaacgggattacgtataaaaagtagacagcagcatcctcagaaaacttctttgtgatgtgtgcattcaagtcacagagttgaacattccctttcgtacagcagttttgaaacactctttctgtagtatctggaagtgaacattaggacagctttcaggtctatggtgagaagggaaatatcttcaaataaaaactagacagaagcattctcataaacttgcttgtgatgtgtgaactcagctaacagaggtggatctttcttttgatagagcagttctgaaaaacactttttgttgaatctgcaagtggacatttggatagatttgaagatttcgttggaaacgggaatatcttcatatcaaatctagacagaagcattctcagaaacgtctttgcgatgtttgcattcaactcatagagttgaacattccgtttcagagagcagctgtgaggcactctttttgtagtatgtgcaagtggatatttggagcgctctgaggcctacggtgaaaaggcaaatatcttcccataaccactagacagaaacattctcagaaactcctttatgacgtatgcactcacctaaaagagaagaaccttccttttgacagagcagttttgatacactctttttgtagaatctgcaagtggatatttggatagctgtgaagattttgctggaaacgggaatatcttcttataaaatctagacagcagcattctcagaaactgctctgtgatgtctgcattcaagtcacagagttgaacattgcctttcatagagcaggtttgaaatgctctttttttagtatatggaagtggacttttcggacggtttgaggcccatggtgataaagggaatatcttcccctacaagctagaaagaagcattctgtgaaacttgtttgtgatgtgtgtactcaactaacagagttgaacctttctttttacagagcagttttgcaacactctttttgtagaatctgcgaggggatatttggatagatttcaggatttcgttggaaacgggaatatcttcatataaaatctcgacagaagcattctcagaatcttctttgtgatatgtgcattcaagtcacagagttgaatattccctttcacagagtaggtttgaaacactctttttgtagtatctggaagtggacatttggagcgccttgacacctacggtgaaaagcaaaatatcttcccataaaaactagacagaagcaatctcagaatcttctttgggatatatgcacgcagctaacagagttgaacctttctattgacagagcagttttgaaacagtctttctgtggaatctgcaagtggatacttggatagcttggaggatttcgttggaaacgggattaagtataaaaagtagacagcagcatcctcagaaacttctttgtgatgtctgcattcaagtcacagagttgaacattccctttcgtacagcagttttgaaacactctttctgtagtatctgcaagtgaacattaggacagttttcaggtctatggtgagaaaggaaatatcttcaaataaaaactagacagaagcattctgataaacttgtttgtgaagtgtgaactcagctaacagaggtggatctttcttttgatagagcagttctgaaaaacactttttgttgaatctgcaagtggacatttggatagatttgaagatttcgttagaaacgggaatatcttcatatcaaatctagacagaagcattctcagaaacgtctttgtgatgtttgcattcaactcatagagttgaacattccctttcagagagcagctttgaagcactctttttgtagtatgttcaagtggacatttggagcgctttgaggcctacggggaaaaagcaaatatcttcccataaccactagacagaaacattctcagaaactcctttatgacgtatgcactcacctaacagaaaagaaccttccttttgacagagcagttttgatacactctttttgtagaatctgcaagtggatatttgggatagctgtgaagatttcgttggaaacgggaatatcttcctataaaatctagacagaagcattctcagaaactgctctgtgatgtctgcattcaagtcacagagttgaacattccctttcatacagcagttttgaaacactctttctgtagtatctggaagtgaacattaggacagctttcaggtctatggcgagaaaggaaatatcttcaaataaaaactagacagaagcattctgtgaaacttgtttgtgatgtgtgtactcaactaacagagttgaacctttcttttcacagagcagttttgaaacactctttttgtagaatctgcgaggggatatttggatagatttcaggatttcgttggaaacaggaatatcttcatataaaatctcgacagaagcattctcagaaacttctttgtgatatgtgcattcaagtcacagagttgaatattccctttcacagagtaggtttgaaacactctttttgtagtatctggaagtggacatttggagcgccttgacgcctacggtgaaaagggaaatatcttcccataaaaagtagacagaagcaatctcagaatcttctttgtgatatatgcacgcagctaacagagttgaacctttctattgacagagcagttttgtaacagtctttctgtggaatctacaagtggatatttggatagcttggaggatttcgttggaaacgggattaggtataaaaagtagacagcagcatcctcagaaactgctttgtgatgtgtgcattcaagtcacagagttgaacattccctttcatacagcagttttgaaacactctttctgtagtatctggaagtgaactttaggagagctttcaggtctatagtgagaaaggatatatcttcaaataaaactagacagaagcattctcataaacttgtttctgatgtgtgaactcagctaacagaggtggatctttcttttgatagagaagttctgaaaaacactttttgttgaatctgcaagtggacatttggatagatttgaagatttcgttggaaacgggaatatcttcatatcaaatctagacagaagcattctcagagacgtctttgtgatgtttgcattcaactcatagagttgaacattccgtttcagagagcagctttgaggcactctttttgtagtatgtgcaagtggatatttggaccgctctgtggcctacggtgaaaaagcaaatatcttcccataaccactagacagaaacattctcagaaactcctttatgacgtgtgcactcacctaacagagaagaaccttccttttgacagagcagttttgatacactctttttgtagaatccgcaagtggatatttggatagctgtgaagatttcgttggaaacgggaatatcttcctataaaatctagacagaaagcattctcagaaactgctctgtgatgtctgcattcaagtcacagagttgaacattgcctttcatagagcaggtttgaaacgctctttttgtagtatatggaagtggacttttcggaaggtttgaggcccatggtgataaagggaatatcttcccctacaagctagaaagaagcattctgtgaaacttgtttgtgatgtgtgtactcaactaacagagttgaacctttcttttcacagagcagttttgaaacactctttttgtagaatctgcgagcggatatttggatagatttcaggatttcgatggaaacgggaatatcttcatataaaatctcgacagaagcattctcagaaacttctttgtgatatgtgcattcaagtcacagagttgaatattccctttcacagagtaggtttgaaacactctttttgtagtatctggaagtggacatttggagcgccttgatgcctacggtgaaaagggaaatatcttcccataaaaactagacagaagcaatctcagaatcttccttgggatatatgcacgcagctaacagagttgaacctttctattgacagagcagttttgaaacagtctttctgtggaatctgcaagtggacatttggatagcttggaggatttcgttggaaacgggattacgtataaaaagtagacagcagcatcgtcagaaacttctttgtgatgtgtgcattcaagtcacagagttgaacattccctttcgtacagcagttttgaaacactttttctgtagcatctggaagagaacattaggacagctttcaggtctagggtgagaaaggcaatatcttcaaataaaaactagacagaagcattctcataaacttttttgtgatgtgtgaactcagctaacagaggtggatctttcttttgatagagcagttctgaaaaacactttttgttgaatctgcaagtggacatttggatagatttgaagatttcgttggaaacgggaatatcttcataacaaatctagacagaagcattctcagaaacgtctttgtgatgtttgcattcaactcatagagttgaacattccctttcagagagcagctttgaagcactctttttgtagtatgtgcaagtggatatttggagcgctactgaggcctacggtgaaaaagcaaatatcttcccataaccactaggcagaatcattctcagaaactcctttatgacgtatgtactcaactaacagagaagaaccttccttttgacagagcagttttgatacactctttttgtagaatctgcaagtggatatttggatagctgtgaagatttcgttggaaacgggaatatcttcctataaaatctagacagaagcattctcagaaactgctctgtgatgtctgtattcaagtcacagagttgaacattgcatttcatagagcaggtttgaaacgctctttttgtagtatatggaagtggatgtttcggacggttggaggcccatggtgataaagggaatatcttcccctacaagctagaaagaagcattctgtgaaacttgtttgtgatgtgtgtactcaactaagagagttgaacctttcttttcacagagcagttttgaaacactgtttttgtagaatctgcgaggggatatttggatagatttcaggatttcgttggaaacgggaatatcttcatacaaaatctcgacaggagcattctcagaaacttctttgtgatatgtgcattcaagtcacagagttgaatattccctttcacagagtaggtttgaaacactctttttgtagtatctggaagtggacatttggagcgccttgacacctacggtgaaaagggaaatatcttccaataaaaactagacagaagcaatctcagaatcttcttagggatatatgtacgcagctaatagagttgaacctttctattgacagagcagttttgaaacagtctttctgtggaatctgcaagtggatatttggatagcttggaggatttcgttggaaacgggattacgtataaaaagtagacagcagcatcctcagaaacttctttgtgatgtgtgcattcaagtcacagagttgaacattccctttcatacagcagttttgaaacactgtttctgtagtatctggaagtgaacattaggacagctttcaggtctatggtgagaaaggcaatatcttcaaataaaaactagacagaaagaattctcatcaacttgtttgtgatgtgtgaactcagctaacacacgtggatctttcttttgatagagcagttctgaaaaacactttgttgaatctgcaagtggacatttggatagatttcaagatttcgttggaaacgggaatatcttcatatcaaatctagacagaagcattctcagaaacgtctttgtgatgtttgcattcaactcatagagttgaacattccgtttcagagagcagctttgaaggactctttttgtagtatgtgcaagtggatatttggagcgctctgaggcctacggtgaaaaagcaaatatcttcccataaccactagacagaaacattctcagaaacttctttatgacgtatgtactcaactaacacagaagaaccttccttttgacagagcagttttgataaactctttttgtagaatctgcaagtggatatttggatatctgtgaagaattcgttggaaacgggaatatcttcctataaaatctaaacaaaagcattctcagaaactgctctgtgatgtctgcattcaagtcacagagttgaacattgcctttcatagagcaggtttgaaacgctctttttgtagtatatggaagtggaagtttcggacggttggaggcccatggtgataaagggaatatcttcccctacaagctagaaagaagcattctgtgaaacttgtttgtgatgtgtgtactcaactaacagagttgaacctttctttttacagagtagttttgaaacactctttttgtagaatctgcgaggggatatttggataggtttcaggatttcgttggaaacgggaatatcttcatataaaatctcgacagaagcattctcagaaacttctttgtgatatctgcattcaagtcacagaagtgaatattccctttcacagagtaggtttgaaacactctttttgtagtatctggaagtggacatttggagcgccttgacgcctatggttaaaagggaaatatcttcccataaaaactagacagaagcaatctcagaatccgctttgggatatatgcacgcagctaacagagttgaacctttctattgacagagcagttttgaaacagtctttctgtggaatctgcaagtggatatttggatagcttggaggatttcgttggaaacgggattacgtataaatagtagacagcagcatcctcagaaacttttttgtgatatgtgcattcaagccacagatttgaacattccctttcgtacagcagttttgaaacactctttctgtagtatctggaagtgaacattaggacagctttcaggtctatggtgagaaaggaaatatcttcaaataaaaactagacagaagcattctgataaacttgtttgtgaagtgtgatctcagctaacagaggtggatctttcttttgatagagtagttctgaaaaacactttgttgaatctgcaagtggacatttggatagatttgaagatttcgttggaaacgggaatatcgtcataaatctagacagaatcattctcagaaacgtctttgtcatgtttgcattcaactcatagagttgaacattccgtttcagagagcagctttgaagcactctttttgtagtatgtgcaagtggatatttggagcgctctgaggcctaaggtgaaaaagcaaatatcttcccgtaaccactagacagaaacattctcagaaactcctttatgacgtatgcactcacctaacagagaagaaccttccttttgacagagcagttttgatacactctttttgtagaatctgcaagtggatatttggatagctgtgaagatttcgttggaaaggggaatatcttcctataaaatctagacggaagcattctcagaaactgctctgtgatgtctgcattcaagtcacagagttgaacattgcatttcatagagcaggtttgaaatgctctttttgtagtatatggaagtggacgtttcagacggtttgaggcccatggtgataaagggaatatcttcccctacaagctagaaagaagcattctgtgaaacttgtttgtgatgtgtgtactcaactaacagagtggaacctttctttttacagagcagttttgaaacactctttttgtagaatctgcgaggggatatttggatagatttcaggatttcgttggaaacgggaatatcttaatataaaatctcggcaaaagcattctcagaaacttctttgtgatatgtgcattcaagtcacagagttgaatattccctttcacagagtaggtttgaaacactctttttgtagcatctggaagtggacatttggagtgccttgactcctacggtgaaaagggaaatatcttcccataaaaactagacagaagcaatctcagaatcttctttgggatatatgcacgcagctaatagagttgaacctttctattgacagagcagttttgaaacagtctttctgtggaatctgcaagtggatatttggatagcttggaggatttcgttggaaacgggattacgtagaaaaagtagacagcagcatcctcagaatcttctttgtgatgtgtgcattcaagtcacagagttgaacattccctttcgtacagcagtttttaaacactctttctgtagtatctggaagtgaacattaggacagctttcaggtctatggtgagaaaggaaatatcttcaaataaaaactagacagaagcattctcataaacttgtttgtgatgtgtgaactcagctaacagaggtggatctttcttttgatagagcagttctgaaaaacactttttgttgaatctgcaagtggacatttggatagatttgaagatttcgttggaaacgggaatatcttcatatcaaatctagacagcagcattctcagaaacgtctttgcgatgtttgcattcaactcacagagttgaacattccgtttcagagagcagctttgaggcactctttttgtagtatgtgcaactggatatttggagcgctctgaggcctacggtgaaaaagaaaatatcttcccataaccactagacagaaacattctcagaaacttctttatgacgtatgtactcaactagcagagaagaactttccttttgacagagcatttttgatacattctttttgtagtatctgcaagtggatatttggatagctgtgaagatttcgttggaaacgggaatatcttcctataaagtctggacagaagcattctcagaaactgctctgtgatgtctgcattcaagtcacagagttgaacattgcctttcatagagcaggtttgaaacgctctttgtgtagtatatggaagtggatgtttcggacggttggaggcccatggtgataaagggaatatcttcccctacaagctagaaagaagcattctgtgaaagttgtttgtgatgtctgtactcaactaacagagttgaacctttctttttacagagcagttttgaaacactctttttgtagaatctgcgaggggatatttggatagatttcaggatttcgttggaaacgggaatatcttcataaaaaatctcgacagaagcattctcagaaacttctttgtgatatgtgcattcaagtcacagagttgaatattccctttcacacagtaggtttgaaacactctttttgtagtatctggaagtggacatttggagcgccttgacgcctacggtgaaaagggaaatatcttcccacaaaaactagacagaagcaatctcagaatcttctttgggatatatgcacgcagctaacagagttgaacctttctattgacagagcagttttgaaacattctttctgtggaatctgcaagtggatatttggatagcttggaggatttcgttggaaacaggattacgtataaaaagtagacagcagcatcctcagaaacatccttgtgatgtgtgcattcaagtcacagagttgaacattccctttcgtacagcagttttgaaacactctttctgtagtatctggaagtgaactttaggacacctttcaggtctatagtgagaaaggatatatcttcaaataaaaactagacagaagcattctcataaacttgtttgtgatgtgtgaactcagctaacagaggtggatctttcttttgatagagcagttctgataaacactttttgttgaatctgcaagtggacatttggatagatttgaagatttcgttggaaacgggaatatcttcatatcaaatctagacagaagcattctcggaaacgtctttgtgatgtttgcattcaactcatagagttgaacattccgtttcagagagcagctttgaagcactctttttgtagtatgtgcaagtggatatttggagcgctgtgaggcctacggtgaaaaagcaaatatcttcccataaccactagacagaaacattctcagaaactcctttatgacgtatgcactcacctaacagagaagaaccttccttttgacagagcagttttgatacactctttttgtagaatctgaaagtggatatttggatagctgtgaagagttcgttggaaacgggaatatcttcctataaaatctagacagaagcattctcagaaactgctctgtgatgtctgcattcaagtcacagagttgaacattgcctttcatagagcaggtttgaaacgctctttttgtagtatatggaagtggacgtttcggacggtttgaggcccatggtgataaagggaatatcttcccctacaagctagaaagcagcattctgtgaaacttgtttgtgatgtgtgcactcaactaacagagttgaacctttctctttacagagcagttttgaaacactctttttgtagaatctacgaggggatatttggatacatttcaggatttcgctggaaacgggaatatcttcatataaaatctcgacagaagcactctcagaaacttctttgtgatatgtgcattcaagtcacagagttgaatattccctttcacagagtaggtttgaaacactctttttgtagtgtctggaagtggacatttggagcgccttgacacctacggtgaaaagggaaatatcttcccataaaaactagacagaagcaatctcagaatcttctttgggatatatgcacgcagctaacagagttgaacctttctattgacagagcagttttgaaacagtctttctgaggaatctgcaagtggatatttggatagcttggaggatttcgttggaaacgggattacgtataaaaagtagacagcagcatcctcagaaacttctttgtgatgtgtgcattcaagtcacagggttgaacattccctttcgtacagcagttttgaaacactctttctatagtatctggaagtgaacattaggacagctttcacgtctatggtgagaaaggaaatatcttcaaataaaaactagacagaagcattctcataaacttgtttgtgatgtgtgaactcagctaacagaggtggatctttcttttgatagagcagttctgaaaaacactttttgttgaatctgcaagcggacatttggatatatttgaagatttcgttggaaacgggaatatcttcatatcaaatctagacagaagcattctcagaaacgtctttgtgatgtttgcattcaactcatagagttgaacgttccgtttcagagagcagctttgaagcactctttttgtagtatgtgcaagtggatatttggagcgctctgaggcctacggtgaaaaagcaaatatcttcccataaccactagacagaaacattctcagaaactcctttatgacgtatgcactcacctaacagagaagaaccttccttttgacagagcagttttgatacactctttttgtagaacctgcaagtggatatttggatagctgtgaagatttcgttggaaacggtaatatcttcctataaaatctagacagaagcattctcagaaactgctctgtgatgtctgcattcaagtcacagagttgaacattgcctttcatagagcaggtttgaaacgctctttttgtagtatatggaagtggacgtttcggacggtttgagtcccatggtgataaagggaatatcttccaccacaagctagaaagaagcattctgtgaaacttgtttgtgatgtgtgtactcaactaacagagttgaacctttctttttaaagagcagttttgaaacactctttttgtagaatctgcgaggggatatttggatagatttcaggatttcgttggaaacgggaatatcttcatatgaaatctcgacagaagcattctcagaaacttccttgtgatatgtgcattcaagtcacagagttgaatattccctttcacagagtaggtttgaaacactctttttgtagtatctggaagtggacatttggagcgccttgacgcctacggtgaaaagggaagtatcttcccatcaaaactagacagaagcaatctcagaatcttctttgggatatacgcacgcagctaacagagttgaacctttctattgacagagcagttttgaaacagtctttctgtggaatctgcaagtggatatttggatagcttggaggatttcgttggaaacgggattacgtataaaaagtagacagcagcatcctcagaaacttctttgtgatgtgtgcattcaagtcacagagttgaacattccctttcgtacagcagctttgaaacactctttctgtagtatctggaagtgaacattaggacagctttcaggtctgtggtgaaaaagggaatatcttcaaataaaaactagacagaagcattctcataaacttgtttgtgatgtgtgaactcagctaacagaggtggatctttcttttgatagagcagttctgaaaaacactttttgttgaatctgcaagtggacatttggatagatttgaagatttcgttggaaacgggaatatcttcatatcaaatctagacagaagcattctcagaaacgtctttgcgatgtttgcattcaactcatagagttgaacattccgtttcagagagcagctttgaggcactctttttgtagtatgtgcaagtggatatttggagcgctctgaggcttacggtgaaaaagcaaatatcttcccataaccactagtcagaaacattctcagaaactcctttatgacgtatgcactcacctaacagagaagaaccttccttttgacagagcagttttgatacactctttttgtagaatctgcaagtggatatttggatagctgtgaagatttcgttggaatcgggaatatcttcctacaaaatctagacagaagcattctcagaaactgctctgtgatgtctgcattcaagtcatagagttgaacattgcctttcatagagcaggtttgaaacgctctttttgtagtatatggaagtggacgtttcggacggtttgaggcccatggtgataaagggaatatgttcccctacaagctagaaagaagcattctatgaaacttgtttgtgatgtgtgtactcaactaacagagttgaacctttctttttaaagagcagttttgaaacactctttttgtagaatctgtgaggggatatttggatagatttgaggatttcgttgggaacgggaatatcttcatataaaatctcgacagaaacattctcagaaacctctttgtgatatgtgcattcaagtcacagagttgaatattccctttgacagagtaggtttgaaacactccttttgtagtatctggaagtggacatttggagcaccttgacgcctacggtgaaaagggaaatatcttcccataaaaactagacagaagcaatctcagaatcttctttgggatatatgcacgcagctaacagagttgaacctttctattgacagagcagttttgaaagagtctttctgtggaatctgcaagtggatatttggatagcttggaggatttcgttggaaacgggattacgtataaaaagtagacagcagcatcctcagaaactcctttgtgatgtgtgcattcaagtcacagagttgaacattccctttcgtacagcagttttgaaacactctttctgtagtatatggaagtgaacattaggacagctttcagctctatggtgagaaaggaaatatcttcaaataaaaactagacagaagcattctcataaacttgtttgtgatgtgtgaactcagctaacagaggtggatctttcttttgatagagcagttctgaaaaacactttttgttgaatctgcaagtggacatttggatagatatgaagatttcgttggaaacgggaatatcttcatatcaaatctagacagaagcattctcagaaacgtctttgtgatgtttgcattcaactcatagagttgaacattccgtttcagagagcagctttgaggcactctttttgtagtatgtgcaagtggatatttggagcgctctgaggcctacggtgaaaaagcaaatatcttcccatgaccactagacagaaacattctcagaaactcctttatgacgtatgcactcacctaacagaaaagaaccttccttttgacagagcagttttgatacactctttttgtagaatctgcaagtggatatttggatagctgtgaagatttcgttggaaacttgaatatcttcctataaaatctagacagaagcattctcagtaaactgctctgtgatgtctgcattcaagtcacagagttgaacattgcctttcatggagcaggtttgaaacgctctttttgtagtatatggaagtggacttatcggacggtttgaggcccacggtgataaagggaatatcttcccctacaagctagaaagaagcattctgtgaaacttgtttgtgatgtgtgtactcaactaacagagttgaacctttctttttacagcgcagttttgaaacactctttttgtagaatctgcgaggggatatttggatagatttcaggatttcgttggaaacgggaatatcttcatataaaatctcgacagaagaattctcagaaacttctttgtgatatctgcattcaagtgacagagttgaatattccctttcacagagtaggtttgaaacactctttttgtagtatctggaagtggacattttgagcgccttgacacctacggtgaaaagggaaatatcttcccataaaaactagacagaaagcaatctcagaatcttctttgggatatatgcacgcagctaacagagttgaacctttctattgacagagcagttttgtaacagtttttctgtggaatctgcaagtggatatttggatagcttggaggatttcgttggaaacgggtttacgtataaaaagtagacagtagcatcctcagaaacttctttgttatgtgtgcattcaagtcacagagttgaacattccctttcgtacagcagttttgaaacactctttctgtagtatctggaagtgaacattaggacagctttcagctctatggtgagaaaggaaatatcttcaaataaaaactagacagaagcattctcataaacttgtttgtgatgtgtgaactcagctaacagaggtggatctttcttttgatagagcagttctgaaaaacactttttgttgaatctgcaagtggatatttggatagattgaagatttcgttggaaacgggaatatcttcatatcaaatctagacagaagcattctcagaaacgtctttgtgatgtttgcattcaactcatagagttgaacattcccttccatagagcagatatgaagcactctttttgtagcatgtgcaagtggacatttggagcgccctgagacctacggggaaaaagcaaatatcttcccataaccactagacagaaacattctcagaaactcctttatgaagtatgcactcacctaacagagaagaaccttccttttgacagagcagttttgataaactctttttgtagaatctgcaagtggatatttggatagctgtgaagatttcgttggaaacgggaatatcttcctataaaatactagacagaagcattctcagaaactgctctgtgatgtctgcattcaagtcacagaattgaacattgcctttcatagagcaggtttgaaacgctctttttgtactatatggaagaggacgtttcggacggtttgaggaccatggtgataaagggaatatcttcccctacaagctagaaagaagcattgtgtgaaactagtttgggatgtgtgtactcaactaacagagttgaacctttctttttacagagcagttttgaaacactctttttgtagaatctgcgaggggatatttggatagatttcaggatttcgttggaaacgggaatatcttcatataaaagtctcgacagaagcattctcagaaacttctttgtgatatctgcattcaagtcacagagttgaatattccctttcaccgagtaggtttgaaacactctttttgtagtatctggaagtggacatttggagcgccttgacgcctacggtgaaaagggaaatatcttcccataaaaactagacagaagcaatctcagaatcttctttgtgatatatgcacgcagctaacagagttgaacctttctattgactgagcagatttgaaacagtctttctgtggaatctgcaagtggatatttggatagcttggaggatttcattggaaacgggattacgtataaaaagtagacagcagcatcctcagaaacttctttgtgatgtgtgcattcaagtcacagagttgaacattccctttcgtacagcagttttgaaacactctttctgtagtatctggaagtgaacattaggacagctttcaggtctatggtgagaaaggaaataccttccaataaaaactagacagaagcattctcataaacttgtttgtgatgtgtgaactcagctaacagaggtggatctttcttttgatagagcagttctgaaaaacactttttgttgaatctgcaagtggacatttggatagagttgaagatttcgttggaaacgggaatatcttcatatcaaatctagacagaagcattctcagaaacgtctttgtgatgtttgcattcaactcatagagttgaacattccctttcagagagcagctttgaagtactctttttgtagcatgtgcaagtggacatttcgagcgccctgaggcctacggggaaaaagcaaatatcttcctataaccactagacagaaacattctcagaaactgctttaggacgtatgcactcacctaacagagaagaaccttccttttgacagagcagttttgatacactctttttgtagaatctgcaagtggatatttggatagctgtgaagatttcgttggaaacgggaatatcttcctataaaatctagacagaagcattctcagaaactgctctgtgatgtctgcattcaagtcacagagttgaacattgcctttcatagagcaggtttgaaacgctctttttgtagtatagggaagtggatgtttcggacggttggaggcccatggtgataaagggaatatcttcccctacaagctagaaagaagcattctgtgaaacttgtttgtgatgtgtgtactcaactaacagagttgaacctttctttttacagagcagttttgaaacactctttttgtagaatctgtgaggggatatttggatagatttcaggatttcgttggaaacgagaatatcttcatataaaatctcgacagaagcattctcagaaacttccttgtgatatctgcattcaagtcacagagttgaatattccctttcacagagtaggtttcaaacactctttttatagtatctggaagtggacatttggagcgccttgacgcctacggtgaaaagggaaatatcttcccataaaaactagacagaagcaatctgagaatcttctttgggatatatgcacgcagctaacagagttgaacctttctgttgacagagcagttttgaaacagtctttctgtggaatctgcaagtggatatttggatagattggaggatttcgttggaaacgggattacgtataaaaagtagactgcagcatcctcagaaacatccttgtgatgtgtgcattcaagtcacagagttgaacattccctttcgtacagcagttttgaaacactctttctgtagtatctggaagtgaactttatgagagctttcaggtctatagtgagaaaggatatatcttcaaataaaaactagacagataagcattctcataaacttgtttgtgatgtgtgaactcagctaacagaggtggatctttcttttgatagagcagttctgaaaaacactttttgttgaatctgcaagtggacattaggatagatttgaagatttcgttggaaacgggaatatcttcatatcaaatctagacagaagcattctcagaaacgtctttgtgatgtttgcattcaactcatagagtcgaacattccgtttcagagagcagctttgaggcactctttttgtagtatgtgcaagtggatatttggagcgctctgaggcctacggtgaaaaagcaaatatcttcccataaccactagacagaaacattctcagaaactcctttatgacgtatgcactcacctaacagaggagaaccttcctttcgacagaacagttttgatacactctttttgtagaatctgcaagtggatatttggatagctgtgaagatttcgttggaaacgggaatatcttcctataaaatctagacagaagcattctcagaaactgctctgtgatgtctgcattcaagtcacagagttgaacattgcctttcatagagcaggtttgaaacgctctttttgtagtatatggaagtggacttttcggacggtttgaggcccatggtgataaagggaatatcttccactacaagctagaaagaagcattctgtgaaacttgtttgtgatgtgtgtactcaagtaacagagttgaacctttctttttacagagcagttttgaaacactctttttgtagaatctgcgaggggatatttggatagatttcaggatttcgttggaaaaggtaatatcttcatataaaatctcgacagaagcattctcagaaacttctttgtgatatgtgcattcaagtcacagagttgaatattccctttcacagagtaggtttgaaacactctttttgtagtatctggaagtggacatttggagcaccttgacacctacggtgaaaagggaaatatcttcccataaaaactagacagaagcaatctcaaaatcttctttgggatatatgcacgcagctaacagagttgaacctttctattgacagagcagttttgaaacagtctttctgtggaatctgcaagtgggtatttggatagcttggaggatttctttggaaacgggattacgtataaaaagtagacagcagcatcctcagaaatttccttgtgatgtgtgcattcaagtcacagagttgaacattccctttcgtacagcagttttgaaacactctttctgtagtatctggaagtgaactttaggagagctttcaggtctatagtgagaaaggatatatcttcaaataaaaactagacagaagcattctcataaacttgtttgtgatgtgtgaactcagctaacagaggtggatctttcttttgatagagcagttctgaaaaacactttttgttgaatctgcaagtggacatttggatagatttgaagatttcgttggaaaggggaatatcttcatatcaaatctagacagaagcattctcagaaacgtctttgtgatgtttgcattcaactcatagagttgaacattcggtttcagagagcagctttgaggcactctttttgtagtatgtgcaagtggatatttggagcgctctgaggcctacggtgaaaaagcaaatatcttcccataaccactagacagataaacattctcagaaactcctttatgacgtatgcactcacctaacagaaaagaaccttccttttgacagagcagttttgatacactctttttgtagaatctgcaagtggatatttggatagctgtgaaggtttcgttggaaacgggaatatcttcctataaaatctagacagaagcattctcagaaactgctctgtgatgtctgcattcaagtcacagagttgaacattgcctttcatagagccggtttgaaacgctctttttgtagtatatggaagtggatgtttcggacggttggaggcccatggtgataaagggaatatcttcccctacaagatagaaagaaagcattgtgtgaaacttgtttgtgatgtgtgtactcaactaacagagttgaacctttcttttcacagagcagttttgaaacactctttttgtagaatctgcgaggagatatttggatagatttcagcatttggttggaaacgggaatatcttcatgtaaaatctcgacagaagcattctcagaaacttctttgtgatatctgcattcaagtcacagagttgaatattgcctttcacatagtaggtttgaaatactctttttgtagtatctggaagtggacatttggagcgccttgacacctacggtgaaaagggaaatatcttcccataaaaactagacagaagcaatctcagaattttctttgggatatatgcacgcagctaaaagagttgaacctttctattgacagagcagttttgaaacagtctttctgtggaatctgcaagtggatatttggatagcttggaggatttcgttggaaacgggattacgtataaaaagtagacagcagcatcctcagaaactactttgtgatgtgtgcattcaagtcacagagttgaacattccctttcgtacagcagtgttgaaacactctttctgtagtatctggaagtgaacattaggacagctttcaggtctatggtgagaaaggaaatatcttcaaataaaaactagacagaagcattctcataaacttgtttgtgatgtgtgaactcagctaacagacctggatctttcttttgatacagcagttttgaaaaacactttttgttgaatctgcaagtggacatttggatagatatgaagatttcgttggaaacgggaatatcttcatatcaaatctagacagaagcattctcagaaacgtctttgtgatgtttgcattcaactcatagagttgaacattcggtttcagagagcagctttgaagcactctttttgtagcatgtgcaagtggacatttggagcgccctgaggcctacggggaaaaagcaaatatcttcccataaccactagacagaaacattctcagaaacttctttatgacgtatgtactcaactaaccgagaagaaccttccttttgacagagcagttttgatacactctttttgtagactctgcaagtggatatttggatatcagtgaagaattcgttggaaacgggaatatcttcctataaaatctaaacagaagcattctcagaaactgctctgtgatgtctgcattcaagtcacagagttgaacattgcctttcatagagcaggtttgaaacactctttttttagtatatggaagtggacgtttcggacggtttgaggcccatggtgataaaggaaatatcttcacctacaaggtagaaagaagcattctgtgaaacttgtttgtgatgtgtgtactcaactaacagagttgaacctttctttttacagagcagttttgaaacactctttttgtagaatctgcgaggggatatttggatacatttcaggatttcgttggaaaggggaatatcttcatataaaatctcgacagatgcattctcggaagcttctttgtgatatgtgcattcaagtcacaaagttgaatattccctttcacagagtaggtttgaaacactctttttctagtatctggaagtggacatttggagcgccttgatgcctacggtgaaaagggaaatatcttctcataaaaagtagacagaagcaatctgagaatcttctttgggatatatgcacgcagctaacacagttgaacctttctattgaaagagcagtttagaaacagtctttctgtggaatctgcaagtggatatttggatagctgtgaagatttcgttggaaacaggaatatcttcctataaaggctggacagaagcatcctcagaaacttctttgtgatgtgtgcattcaagtcacagagttgaacattccctttcgtacagcagttttgaaacactctgtagtatctggaagtgaacattaggacagctttcaggtctatggtgagaaaggaaatatcttcaaataaaaactagacagaagcattctcatcaacttgtttgtgatgtgtgaactcagctaacagaggtggatctttcttttgatagggcagttctgaaaaacactttttgttgaatctgcaagtggacatttggatagatttgaagatttcgttggaaacgggaatatcctcatatcaaatctagacagaagcattctcagaaacgtctttgtgatgttagcattcaactcatagagttgaacattccctttcagagagcagctttgaagcactctttttgtactatgtgcaagtggatatttggagcgctctgaggcctatggtgaaaaagcaaatatcttcccataaccactagacagaaacattctcagaaactcctttatgacgtatgcactcacctaacagagaagaaccttccttttgacagagcagttttgatacactctttttgtagaatctgcaagtggatatttggatagctgtgaagatttcgttggaaaggggaatatcttcctataaaatttagacggaagcattctcagaaactgctctgtgatgtctgcattgaagtcacagggttgaacattgcctttcatagagcaggtttgaaacgctctttttgtagtatatggaagtggacgtttcggacggtttgaggcccatggtgataaagggaatatcttcccctacaagctagaaagaagcattctgtgaaacttgtttttgatgtgtgtactcaactaacagagttgaacctttctttttacagagcagttttgaaacactctttttgtagaatctgcgaggggatatttggatacatttcagcatttcgttggaaacgggaatatcttcatataaaatctcgacagaagcattctcagaaacttctttgtgatatgtacattcaagtcacagagttgaatattccctttcacagagtaggtttgaaacactctttttgtagtatctggaagtggacatttggagcgccttgacacctacggtgaaaagggaaatatcttcccataaaaactagacagaagcaatctcagaatcttctttgggatatatgcacgcagctaacagagttgaacctttctattgacagagcagttttgaaacagtctttctgtggaatctgcaagtggatatttggatagagtggaggatttcgttggaaacgggattacgtataaaaagtagaccgcagcatcctcagaaacttctttgtgatgtgtgcattcaagtcacagagttgaacattccctttcgtacagcagttttgaaacactctttctgtagtatctggaagtgaacattaggacagctttcaggtctatggtgagaaaggaagcatcttcaaataaaaactagacagaagcattctcataaacttgtttgtgatgtgtgaactcatctaacagaggtggatctttcttttgatagagcagttctgaaaaacactttttgttgaatctgcaagtggacatttggatagatttgaagatttcgttggaaacgggaatatcttcatatcaaatgctagacagaagcattctcagaaacgtctttgtgatgtttgcattcaactcatagagttgaacattccgtttcagagaccagctttgaagcactctttttgtagtatgtgcacgtggatatttggagcgctctgaggcctacggtgaaaaagcaaatatcttcccataaccactagacagaaacattctcagaaactcctttatgacgtatgcactcacctaacagagaagaaccttccttttgacagagcagttttgatacactctttttgtagaatctgcaagtggatattttgatagctgtgaagatttcgttggaaacgggaatatcttcctataaaatctagacagaagcattctcagaaactgctctgtgatgtctgcattcaagtcacagagttgaacattgcctttcatagagcaggtttgaaacgctctttttgtagtatatggaagtggatgtttcggacggtttgaggcccacggtgataaagggaatatcttcccctacaagctagaaagaagcattctgtgaatcttgtttgtgatgtgtgtactcaactaacagggttgaacctttctttttacagagcagttttgaaacactctttttgtagaatctgcgaggggatatttggatagatttcaggatttcgttggaaacgggaatatcttcatataaaatctcgacagaagcattctcagaaacttccttgtgatatgtgcattcaagtcacagagttgaatattccctttcacagagtaggtttgaaacactctttttgtagtatctggaagtggacatttggagcgccttgacgcctacagtgaaaagggaaatatcttcccataaaaactagacagaagctatctcagaatcttctttgggatatatgcacgcagctaacagagttgaacctttctattgacagagcagttttgaaacagtctttctgtggaatctgcaagtggatatttggatagcttggaggatttcgttggaaacgggattacgtataaaaagtagacagcagcatcctcagaaacttctttgtgatgtgtgcattcaagtcacagagttgaacatcacctttcgtacagcagttttgaaacactctttctgtagtatctggaagtgaacattaggatagctttcaggtctatggtgagaaaggaaatatcttcaaataaaaactagacagaagcattctcataaacttgtttgtgaggtgtgaactcagctaacagaggtggatcttacttttgatagagcagttctgaaaaacactttttgttgaatctgcaagtggacatttggatagatttgaagatttcgttggaaacgggaatatcttcatatcaaatctagacagaagcattctcagaaacgtctttgtgatgtttgcattcaactcatagagttgaacattccgtttcagagagctgctttgaagcactctttttgtagcatgtgcaagtggatatttggagcgctctgaggcctacggtgaaaaagcaaatatcttcccataaccactagacagaaacattctcagaaacttctttatgacgtatgtactcaactagcagagaagaactttccttttgacagagcatttttgatacactctttttgcagtatctgcaagtgtatatttggatagctgtgaagatttctttggaaacgggaatatcttcctataaagtctggacagaagcattctcagaaactgctctgtgatgtctgcattcaagtcacagagttgaacattgcctttcatagagcaggtttgaaatgctctttttgtagtatatggaagtggacgtttcagacggtttgaggcccatggtgataaagggaatatcttccccttcaagctagaaagaagcattctgtgaaacttgtttgtgatgtttgtactcaactaacagagttgaacctttctttttacagagcagttttgaaacactctttttgtagaatctgcgaggggatatttggatacatttcaggatttcgttggaaacgggaatatcttcatagaaaatctcgacaaaagcattctcagaaacttccttgtgatatgtgcattcaagtcacagagttgaatattccctttcatagagtaggtttgaaacactctttttgtagtatctggaagtggacatttggagcgccttgacgcctacggtgaaaagggaaatatcttcccataaaaactagacagaagcaatctcagaatctgctttgggatatatgcacgcagctaacagagttgaacctttctattgacagagcagttttgaaacagtctttctgtggaatctgcaagtggatatttggatagcttggaggatttcgttggaaacgggattaagtataaaaagtagacagctgcatcctcagaaacttctttgtgatgtgtgcattcaagtcacagagttgaacattccctttcgtacagcagttttgaaacactctttctgtagtatctggaagtgaacattaggacagctttcagctctatggtgagaaaggaaatatcttcaaataaaaactagacagaagcattctcataaacttgttcgtgatgtgtgaactcagctaacacacgtcgatctttcttttgatagagcagttctgaaaaacactttttgttgaatctgcaagaggacatttggatagatttgaagatttcgttggaaacgggaatatcttcatatcaaatctagacagaagctttctcagaaacgtctttgtgatgtttgcattcaactcatagagttgaacattccgtttcagagaacagctttgaggcactctttttgtagtatgtgcaagtggatatttggagcgctctgaggcctacggtgaaaaagcaaatatcttcccataaccactagacagaaactttctcagaaactcctttatgacggtatgcactcacctaacagagaagaaccttccttttgacagagcagttttgatacactctttttgtagaatctgcaagtggatatttggatacctgtgaagatttcgttggaaacgggaatatcttcctataaaatctagacagaagcattctcagcaaactgctctgtgatgtctgcattcaagtcacagagttgaacattgcctttcatagagcaggtttgaaacgctctttttgtagtatatggaagtggacttatcggacggtttgaggcccatggtgataaagggaatatcttcccctacaagctagaaagaagcattctgtgaaacttgtttgtgatgtgtgtactcaactaacagagttgaacctttctttttacagagcagttttgaaacactctttttgtagaatctgcgaggggatatttgaatagatttcaggatttcgttggaaacgggaatatcttcatataaaatctcgacagaagcattctcagaaacttctttgtgatatgtgcattgaattcacagagttgaatattccctttcacagagtaggtttgaaacactctttttgtagtatctggaagtggacatttggagcgccttgacacctacggtgaaaagggaaatatcttcccataaaaactagacagaagcaatctcagaatcttctttgggatatatgcacgcagctaacagagttgaacctttctattgacagagcagttttgaaacagtctttctgtggaatctgcaagtggatatttggatagcatggaggatttcgttggaaacgggattacgtataaaagtagacagcagcatcctcagaaacatccttgtgatgtgtgcattcaagtcacagagttgaacattccctttcgtacagcagttttgaaacactctttctgtagtatctggaagtgaacattaggacagctttcaggtctatggtgagaaaggaaatatcttctaataaaaacaagacagaagcattctcataaacttgtttgttatgtgtgaactcagctaacacacgtggatctttcttttgatagagcagttctgaaaaacaatttttgttgaatctgcaagtggacatttgggtagatttgaagatttcgttggaaacgagaatatcttcatatcaaatctagacagaagcattctcggaaacgtctttgcgatgtttgcattcaactcatagtgttgaacattccgtttcagagagcagctttgaggcactcattttgtagtatgtgcaagtggatatttggagcgctctgaggccttcggtgaaaaagcaaatatcttcccataaccactagacagaaacattctcagaaactcctttatgacgtatgcactcacctaacagagaagaaccttccttttgacagagcagttttcatacactcttttggtagaatctgcaagtggatatttggatagctgtgaagatttcgttggaaacgggaatatcttcctataaaatctagacagaagcattctcagaaactgctctgtgatgtctgcattcaagtcacagtagttgaacattgcctttcatagagcaggtttgaaacgctctttttgtagtatatggaagtggacttatcggacggtttgaggcccatggtgataaagggaatatcttcccctacaagctagaaagaagcattgtgtgaaacttgtttgtgatgtgtgtactcaactaacagagttgaacctttctttttacagagcagttttgaaacactctttttgtagaatctgcaaggggatatttggatacatttcaggatttcgttggaaacgggaatatcttcatataaaatctcgacagaagcattctcagaaacttccttgagatatgtgcattcaagtcacagagttgaatattccctttcacagagtaggtttgaaacactctttttgtagtatctggaagtggacatttggagcgccttgacgcctacggtgaaaagggaaatatcttcccataaaaactagacagaagcaatctcagaatcttctttgggatatatgcacgcagctaacagagttgaacctttctattgacagagcagttttgaaacagtctttctgtggaatctgcaagtggatatttggatagcctggaggatttcgttggaaacgggattacgtataaaaagtagacagcagcatcctcagaaacttctttgtgatgtgtgcattcaagtcacatagttgaacattccctttcgtacagcagttttgaaacactctttctgtagtatctggaagtgaacattaggacagctttcaggtctatggtgagaaaggaaatatcttcaaataaaaactagacagacaagcattctcataaacttgtttgttatgtgtgaactcagctaacacacgtggatctttcttttgatagagcagttctgaaaaacaatttttgttgaatctgcaagtggacatttggatagatttgaagatttcgttggaaacgggaatatcttcatatcaaatctagacagacgcattctcagaaacgtctttgtgatgtttgcattcaactcatagagttgaacattccgtttcagagagcagctttgaagcactctttttgtagtatgtgcaagtggatatttggtgcgctctgaggcctacggtgaaaaagcaaatatcttcccataaccactagacagaaacattctcagaaactcctttatgacgtatgcactcacctaacagaaaataaccttccttttgacagagcagtttagatacactctttttgtagaatctgcaagtggatatttggatagctgtgaagatttcgttggaaacgggaatatcttcctataaaatctagacagaagcattctcagaaactgctctgtgatgtctgcattcaagtcacagagttgaacattgcctttcatagagcaggtttgaaacgctccttttctattatatggaagtggatgtttcggacggttggaggcccatggtgataaagggaatatcttcccctacaagctagaaagaagcattctgtgaaacttgtttgtgatgtgtgtactcaactaacagagttgaacctttctttttacagagcagttttgaaacactctttttgtagaatctgcgaggggatatttggatagatttcaggatttcgttggaaactggaatatcttcatataaaatttcgacagaagcattctcagaaacttctttgtgatatctgcattcaagtaacagagttgaatattccctttcacagagtaggtttgaaacactctttttgtagtatctggaagtggacatttggagcgccttgacgcctacggtgaaaagggaaatatcttcccataaaaactagacagaatcaatctcagaatcttctttgggatatatgcacgcagctaacagagttgaacctttctattgacagagcagttttgaaacagtctttctgtggaatctgcaagtggatatttggatagcctggaggatttcgttggaaacgggattacgtataaaaagtagacagcagcatcctcagaaacttctttgtgatgtgtgcattcaagtcacagagttgaacattccctttcgtacagcagctttgaaacactctttctgtagtatctggaagtgaacattaggacagctttcaggtctatggtgagaaaggaaatatcttcaaataaaaactagacagaagcattctcataaacttgtttgtgatgtgtgaactcagctaacagaggtggatctttcttttgatagagcagttctgaaaaacactttttgttgaaactgcaagtggacatttggatagatttgaagatttcgttggaaacgggaatatcttcatatcaaatctagacagaagcattctcagaaacgtctttgtgatgtttgcattcaactcatagagttgaacattccctttcagagagcagctttgaagcactctttttgtagcatttgcaagtggacatttggagcgccctgaggcctacggggaaaaagcaaatatcttcccataaccactagacagaaacattctcagaaactcctttgtgacgtatgcactcacctaacagagaagaaccttccttttgacagagcagttttgatacactctttttgtagaatctgcaagtggatatttggatagctgtgaagatttcgttggaaacgggaatatcttcctataaaatctagacagaagcattctcagaaactgctctgtgatgtctgcattcaagtcacagagttgaacattgcctttcatagagcaggtttgaaaccctctttttgtagtatatggaagtggacgtttcggacggtctgaggcccatggtgataaagggaatatcttcccctacaagctagaaagaagcattctgtgaaacttgtttgtgatgtgtgtactcaactaacaaagttgaacctttctttttacagagcagttttgaaacactctttttgtagaatctgcgaggggatatttggatacatttcaggatttcgttggaaacgggaatatcttcatataaaatctcgacagaagcattctcagaaacttctttgtgatatgtgcattcaagtcacagagttgaatattccctttcacagagtaggtttgaaacactctttttgtagtatctggaagtggacatttagagcgccttgacacctacggtgaaaagggaaatatcttcccataaaaactagacagaagcaatctcagaatcttctttgggatatatgcacgcagctaacagagttgaacctttctattgagagagcacttttgaaacagtctttctgtggaatctgcaagtggatatttggatagcttggaggatttcgttggaaacgggattacgtataaaaagtagacagcagcatcctcagaaacttctttgtgatgtgtgcattcaagtcacagagttgaactttccctttcgtacagcagttttgaaacactctttctgtagtatctggaagtgaacactaggacagctttcaggtctatggtgagaaaggaaatatcttcaaataaaaactagacagaaacattctcataaacctgtttgtgatgtgtgaactcagctaacagacgtggatctttcttttgatacagcagttttgaaaaacactttttgttgaatctgcaagtggacatttggatagatttgaagatttcgttggaaacgggaatatcttcatatcaaatctagacagataagcattgtcagaaacgtctttgtgatgtttgcattcaactcatagagttgaacattccgtttcagagagcagctttgaagcactctttttgtagtatgtgcaagtggatatttggagcgctctgaggcctaaggtgaaaaagcaaatatcttcccataaccactagacagaaacattctcagaaactcctttatgacgtatgcactcacctaacagaaaagaaccttccttttgacagagcagttttgatacactctttttgtagaatctgcaagtggatatttggatagctgtgaagatttctttggaaaccggaatatcttcctataaaatctagacagaagcattctcagaaactgctctgtgatgtctgcattcaagtcacagagttgaacattgcctttcatagagcaggtttgaaacgctctttttgtagtatatggaagtggacttattggacggttggaggcccatggtgataaagggaatatcttcccctacaagctagaaagaagcattctgtgaaacttgtttgtgatgtgtgtactcaactaacagagttgaacctttctttttacagagcagttttgaaacactctttttgtagaatctgcgaggggatatttggatagatttcaggatttcgttggaaacgggaatatcttcatataaaatatcgacagaagcattctcagaaacttctttgtgatatctgcattcaagtcacagagttgaatattccctttcacagagaaggtttgaagcactctttttgtaatatctggaagtggacatttggagcgccttgacgcctacggtgaaaagggaaatatcttcccataaaaactagacagaagcaatctcagaatcttctttgggatatatgtacgcagctaatagagttgaacctttctattgacagagcagttttgaaacagtctttctgtggaatctgcaagtggatatttggatagcttggaggatttcgttggaaacgggattatgtataaaaagtagacagcagcatcctcagaaacttctttgtgatgtgttcattcaagtcacagagttgaacattccctttcgtacagcagttttgaaacactctttctgtagtatctggaagtgaacattaggacagctttcaggtctatggtgagaaaggcaatatcttcaaataaaaactagacagaaggtttctcataaacctgtttgtgatgtgtgaactcagctaacagacgtggatctttcttttgatacagcagttttgaaaaacactttttgttgaatctgcaagaggacatttggatagatttgaagatttcgttggaaacgggaatatcttcctatcaaatctagacagaagcattctcagaaacgtctttgtcatgtttgcattcaactcatagagttgaacattccctttcagagagcagctttggaacactctttttgtagtatgtgcaagtggatatttggagcgctctgaggcctacggtgaaaaagcaaatatcttcccataaccactagacagaaacattctcagaaactcctttatgacgtatgcactcacctaacagagaagaaccttccttttgacagagcagttttgatacactctttttgtagaatctgcaagtggatctttggatagctgtgaagatttcgttggaatcgggaatatcttcctacaaaatctagacagaagcattctcagaaactgctctgtgatgtctgcattcaagtcacagagttgaacattgcctttcatagagcaggtttgaaacgctctttttgtagtatatggaagtggacgtttcggacggtttgaggcccatggtgataaagggaatatcttaccctacaagctagaaagagagcattctgtgaaacttgtttgtgatgtgtgtactcaactaacagagttgaacctttctttttacagagcagttttgaaacactctttttgtagaatctgcgaggggatatttggatagatttcaggatttcgttggaaacgggaatatctttatataaaatctcgacagagcattctcagaaacttctttgtgatatctgcattccagtcacagagttgaatattccctttcacagagtaggtttgaaacactctttttatagtatctggaattggacatttggagcgccttgacgcctacggtgaaaagggaaatatcttcccataaaaactagacagaagcaatctcagaatcttctttgggatatacgcacgcagctaacagagttgaacctttctattgacagagcagttttgaaacagtctttctgtggaatctgcaagtggatatttggatagattggaggatttcgttggaaacgggattacgtataaaaagtagacagcagcatcctcagaaactactttgtgatgtgtgcattcaagtcacagagttgaaaattccctttcgtacagcagttttgaaacactctttctgtagtatctggaagtgaactttaggacagctttcaggtctatagtgagaaaggatatatcttcaaataaaaactagacagaagcattctcataaacgtgtttgtgatgtgtgtactcagctaacagacgtggatctttcttttgatacagcagttttgaaaaacactttttgttgaatctgcaagtggacatttggatagatatgaagatttcgttggaaacgggaatatcttcatatcaaatctagacagaagcattctcagaaacgtctttgcgatgtttgcattcaactcatagagttgaacattccgtttcagagagcagctttgaagcactctttttgtagtatgtgcaagtggatatttggagggctctgaggcctacggtgaaaaagcaaatatcttcccataaccactagacagaaacattctcagaaactcctttatgacgtgtgcacttacctaacagagaagaaccttccttttgacagagcagttttgatacactctttttgtagaatctgcaagtggatatttggatagctgtgaagatttcgttggaaacgggaatatcttcctataaaatctagacagaagcattctcagaaactgctctgtgatgtctgcattcaagtcacagagttgaacattgcctttcctagagcaggtttgaaacgctctttttgtagtatatggaagtggacttatcggacggattgaggcccatggtgataaagggaatatcttcccctacaagctagaaagaagcattgtgtgaaacttgtttgtgatgtgtgtactcaactaacagagttgaacctttctttttacagagcagttttaaaacactctttttgtagaatctgcgaggggatatttggatagatttcaggatttcgttggaaacgggaacatcttcatagaaaatctcgacagaagcattctcagaagcttctttgtgatatgtgcattcaagtcacagagttgaatattccctttcacagagtaggtttgaaacactctttttgtagtatctgaagtggacatttggagcgccttgacgcctacggtgaaaagggaaatatcttctcataaaaagtagacagaagcaatctcagaatcttccttgggatatatgtacgcagctaacagagttgaaacttgctattgacagagcagttttgaaacagtctttctgtggaatctgcaagtggatatttggatagcttggaggatttcgttggaaacgggattacgtataaaaagtagacagcagcatcctcagaaacttctttgtgatgtgttcattcaagtcacagagttgaacattccctttcgtacagcagttttgaaacactctttctgtagtatctggaagtgaacattaggacagctttcaggtctatggtgagaaaggaaatatcttcaaataaaaactagacagaagcattctcataaacttgtttgtgatgtgtgaactcagctaacagaggtggatctttcttttgatagagcagttctgaaaaacactttttgttgaatctgcaagtggacatttggatagatttgaagatttcgttggaaacgggaatatcttcatatcaaatccagacagaagcattctcagaaacgtctttgagatgtttgcattcaactcatagagttgaacattccctttcagagagcagctttgaagcactctttttgtagtatgtggaagtggatatttggagcagctctgaggcctacggtgaaaaatcaaatatcttcccataaccactagacagaagcattctgtgaaacttgtttgtgatgtgtgtactcaactaacagagttgaacctttctttttacagagcagttttgaaacactctttttgtagaatctgcgaggggttatttggatagatttcaggatttcgttggaaacgggaatatcttcctataaaatctagacagaagcattctcagaaactgctctgtgatgtctgcattcaagtcacagagttgaacattgcctttcatagagcaggtttgacacgctctttttgtagtatatggaagtggacgtttcggacggtttgaggcccatggtgataaagggaatatgcttcccctactagctagaaagaagcattgtgtgaaacttgtttgtgatgtgtgtactcaactaacagagttgaacctttctttttacagagcagttttgatacactctttttgtagaatctgcgaggggatatttggatagatttcaggatttcgttggaaacgggaatatcttcatataaaatctcgacagaagcattctcagaaacttctttgtgatatgtgcattcaagtcacagagttgaatattcgctttcacagagtaggtttgaaacactctttttgtagtatctggaagtggacatttggagcgccttgacacctacggtgaaaaggaaaatatcttcccataaaaactagacagaaagcaatctcagaatcttctttgggatatatgcacgcagctaacagagttgaacctttctattgacagagcagttttgaaacagtctttctgtggaatctgcaagtggatatttggaaagcttggaggatttcgttggaaacgggattaagtataaaaagtagacagcagcatcctcagaaacttctttgtgatgtgtgcattcaagtcacagagttgaacattccctttcgtacagcagttttgaaacactctttctgtagtatctggaagtgaacattagtacagctttcaggtctatggtgagaaaggcaatatcttcaaataaaaactagacagaagcattctcaaaaacttgtttgggaagtgtgaactcaggtaacagaggtggatctttattttgatagagcagttctgaaaaacactttttgttgaatctgcaagtggacatttggatagatttgaagatttcgttggaaacgggaatatcttcatatcaaatctagacagaagcattctcagaaacgtctttgtgatgtttgcatgcaactcatagagttgaacattccgtttcagagagcagctttgaagcactctttttgtagtatgcgcaagtggatatttggagcgctctgaggcctacggtgaaaaagcaaatatcttcccataaccactagacagaaacattctcagaaacttctttatgacgtatgtactgaactagcagagaagaactgtcctcttgacagagcatttttgatacactctttttgtagtatcagcaagtggatatttggatagatgtgaagatttcgttggaatcgggaatatcttcctataaagtccggacagaagcattctcagaaactgctctgtgatgtctgtattcaagtcacagagttgaacattgcctttcatagagcaggtttgaaatgctctttttgcagtatatggaagtggacgtttcagacggtttgaggcccatggtgataaagggaatatcttcccctacaagctagaaagaagcattctgtgaaacttgttggtgatgtgtgtactcaactaacagagttgaacctttctttttacagagcagttttgaaacactctttttgtagaatctgcgaggggatatttggatagatttcaggatttcgttggaaacgggaatatcttcatataaaatctcgacagaagcattctcagaaacttccttgtgatatgtgcattcaagtcacagagttgaatattccctttcacagagtaggtttgaaacactctttttgtagtatctggaagtggacatttggagcgccttgacgcccacggtgaaaagggaaatatcttcccataaaaactagacaaaagcaatctcagaatcttctttgggatatatgcacgcagctaacagagttgaacctttctattgacagagcagttttgaaacagtctttctgaggaatctgcaagtggatatttggatagcttggaggatttcgttggaaacggtattatgtataaaaagtagacagcagcatcctcagaaacttctttgtgatgtgtgcattcaagtaacagagttgaacattccctttcgtacagcagttttgaaacactctttctgtagtatctggaagtgaacattaggacagctttcagctctatggtgagaaaggaaatatcttcaaataaaaactagacagaagcattctcataaacttgtttgtgatgtctgaactcagctaacagaggtggatctttcttttgatagagcagttctgaaaaacactttttgttgaatctgcaagtggacatttggatagatttgaagatttcgttggaaacgggaatatcttcatatcaaatctacacagaagcattctcagaaacgtctttgtgatgtttgcattcaactcatagagttgaacattccgtttcagagaccagctttgaagcactctttttgtaggatgtgcaagtggatatttggagcgctctgaggcctacggtgtaaaagcaaatatcttcccataaccactagacagaaacattctcagaaactcctttatgacgtatgcactcacctaacagagaagaaccttccttttgacagagcagttttgatacacactttttgtagaatctgcaagtggatatttggatagctgtgaagatttcgttggaaacggaaatatcttcctataaaatctagacagaagcattctcagcaaactgctctgtgatgtctgcattcaagtcacagagttgaacattgcttttcctagagcaggtttgaaacgctctttttgtagtatatggaagtggacgtttcggacggtttgaggcccatggtgataaagggaatatcttcccctacaagctagaaagaagcattctgtgaaacttgtttgtgatgtgtgtactcaactaacagagttgaacctttcttttacagagcagttttgaaacactctttttgtagaatctgcgaggggatatttggatagatttcaagatttcgttgggaacgggaatatcttcatataaaatctcgacagaagcattctcagaaacttctttgtgatatctgcattcaagtcacagagttgaatattccctttcacagagaaggtttgaaacactctttttgtagtatctggaagtggacatttggagcgccttgacgcctacggtggaaagggaaatatcttcccataaaaactagacagaaagcatctcagaatcttctttgggatatatgcacgcagctaacagagttgaacctttctattgacagagcagttttgaaacagtctttctgtggaatctgcaagtggatatttggatagcttggaggatttcgttggaaacgggattacgtataaaaagtagacagagcatcctcagaaacttctttgtgatgtgtgcattcaagtcacagagttgagcattccctttcgtacagcagttttgaaacactctttctgtagtatctggaagtgaacattaggacagctttcatctctatggtgagaaaggaaatatcttcaaataaaaactagacagaaagcattctcataaacttgtttgtgatgtgtgaactcagctaacacacgtggatctttcttttgatacagcagttttgaaaaacactttttgttgaatctgcaagtggacatttggatagatatgaagatttcgttggaaacgggaatatcttcatatcaaatctagacagaagcattctcagaaacgtctttgtgatgtttgcattcaactcatagagttgaacattccgtttcagagagcagctttgaagcactctttttgtagtatgtgcaagtggacatttggagcgctttgaggcctacggtgaaaaagcaaatatcttcccataaccactagacagaaaacattctcagaaactcctgtatgacgtatgcactcacctaacagagaagaaccttccttttgacagagcagttttgatacactctttttgtagaatctgcaagtggatatttggatagctgtgaagctttcgttggaaacgggaatatctccctataaaatctagacagaagcattctcagaaacttctctgtgatgtctgcattcaagtcacagagttgaacattgcctttcatagagcaggtttcaaacactctttttttagtatatggaagtggacgtttcggacggtttgaggcccatggtgataaaggaaatatcttcccctacaagctagaaagaaagcattctgtgaaacttgtttgtgatgtgtgtactcaactaacagagttgaacctttctttttacagagcagttttgaaacactctttttgtagaatctgcgaggggatatttggatacatttcaggatttcgttggaaaggggaatatcttcatataaaatctcgacagaagcattctcagaaacttctttgtgatatctgcattcaagtcacagagttgaatattccctttcacagagtaggtttgaaacactctttttgtagtatctggaagtggacatttggagcgccctgacgcctacggtgaaaagagaaatatcttcccataaaaactagacagaagcaatctcagaatcttctttgggatatatgcacgcagctaacagagttgaacctttctattgacagagcagttttgaaacagtctttctgtggaatctgcaagtggatatttggatagcttggaggatttcgttggaaacgggaatacgtataaaaagtagacagcagcatcctcagaaacttctttgtgatgtctgcattcaagtcacagagttgaacattccctttcgtacagcagttttgaaacactctttctgtagtatctggaagtgaacattaggagagctttcaggtctatggtgagaaaggaaatatcttcaaataaaaactagacagaagcattctcataaacttgtttgtgatgtgtgaactcagctaacagaggtggatctttcttttgatagagcagttctgaaaaacactttttgctgaatctgcaagtggacatttggatagatttgaagatttcgttggaaacgggaatatcttcatatcaaatctagacagaagcattctcagaaacggctttgtgatgtttgcattcaactcatagagttgaaaattccctttcagagagcagctttgaagcactctttttgtagtatgtgcaagtggatatttggagcgctctgaggcctacggtgaaaaagcaaatatcttcccataaccactagacagaaacattctcagaaactcctttatgacgtatgcactcacctaacagaaaagaaccttccttttgacagggcagttttgatacactctttttgtagaatctgcaagtggatatttggatagctgtgaagatttcgttggaaacgggaatatcttcctataaaatctagacagaagcattctcagaaactgctctgcgatgtctgcattcaagtcacagagttgaacattgcctttcatagagcaggtttgaaacgctctttttgtagtatatggaagtggacttatcggacggtttgaggcccatggtgataaagggaatatcttcccctacaagctagaaagaagcattctgtgaaacttgtttgtgatgtgtgtactcaactaacagagttgaacctttctttttacagagcagttttgaaacactctttttgtagaatctgcgaggggatatttggatacatttcaggatttcgttggaaacgggaatatcttcatataaaatcctcgacagaagcattctcagaagcttctttgtgatatgtgcattcaagtcacagagttgaatattccctttcacagagtaggtttgaaacaccctttttctagtatctggaagtggacatttggagcgccttgacgcctacagtgaaaagggaaatatcttctcataaaaagtagacagaagcaatctcagaatctcctttgggatatatgcacgcagctaacagagttgaacctttctattgacagaccagttttgaaacagtctttctgtggaatctgcaagtggatatttggatagcttggaggatttcgttggaaacgggattacgtataaaaagtagacagcagcatcctcagaaacttctttgtgatgtgtgcattcaagtcacagagttgaacattccctttcatacatcagttttgaaacactctttctgtagtatctggaagtgaattttaggagagctttcatgtctatagttggaaaggatatatcttcaaataaaaactagacagaagcattctcataaacttctttgtgatgtgtgaactcagctaaccaaggtggatctttcttttgatagagcagttctgaaaaacactttttgttgaatctgcaagtggacatttggatagatttgaaggtttcgttggaaacgggaatatcttcatatcaaatctagacagaagcattctcagagacgtctttgtgatgtttgcattcaactcatagagttgaacattcccttccagagagtagctttgaagcactctttttgtagcatgtgcaagtggacatttggagcgccctgaggcctacggggaaaaagcaaatatcttcccataaccactagacagaaacattctcagaaacttctttctgacgtatgtactcaactaacagagaagaacctaccttttgacagagcatttttgatacactctttttgtagaatatgcaagtggatatttggatagctctgaagatttctttggaaacgggaatatcttcatatcaaatctagacagaagcattctcagaaactgctctgtgatgtctgcattcaagtcacagagttgaacattgcctttcagagaccaggtttgaaacgctctttttgtagtatatggaagtggatgtttcggacggttggaggcccatggtgataaagggaatatcttcccctacaagctagaaagaagcattctgtgaaacttgtttgtgatgtgtgtactcaactaaaagagttgaacctttcttttcacagagcagttttgaaacactctttttgtagaatctgcgagcggatatttggatagatttcaggatttcgttggaaacgggaatatcttcatataaaatctcgacagaagcattctcagaaacttctttgtgacatctgcctttaagtcacagagttgaatattccctttcacagagtaggtttgaagcactctttttgtagtatctggaagtggacatttggagcgccttgacacctacggtgaaaagggaaatatcttcccataaaaactagacagaagcaatttcagaatcttctttgggatatatgcacgcagctaacagagttgaacctttctattgacagagcagttttgaaacagtctttctgtggaatctgcaagtggatatttggatagttggaggatttcgttggaaacgggattacgtataaaaagtagacagcagcatcctcagaaacatccttgtgatgtgtgcattcaagtcacagagttgaacattccctttcgtacagcagtgttgaaatactctttctgtagtatctggaagtgaactttaggacagctttcaggtctatagtgagaaaggatatatcttcaaataaaaactagacagaagcattctcataaacttgtttgttatgtgtgaactcagctaacacacgtggatctttcttttgatagagcagttctgaaaaacaatttttgttgaatctgcaagtggacatttggatagatttgaagatttccttggaaacgggaatatcttcatatcaaatctagacagaagcattctcagaaacgtctttgtcatgtttgcattcaactcatagagttgaacattccctttcagagagcagctttgaaagactctttttgtagtatgtgcaagtggatatttggagcgctctgaggccaacggtgaaaaagcaaatatcttcccataaccactagacagaaacattctcagaaactcctttatgacgtatgcactcacctaacagagaagaaccttccttttgacagagcagttttgatacactctttttgtagaatctgcaagtggatatttgaatagcattgaagatttcgttggaaacgggaatatcttcctataaaatctagacagcagcattctcagaaactgctctgtgatgtctgcattcaagtcacagagttgaacgttgcctttcatagagtaggtttcaaacactctttttttagtatatggaagagcacgtttcggacggattgaggaccatggtgataaaggaaatatcttcccctacaagctagaaagaagcattctgtgatacttgtttgtgatgtgtgtactcaactaacagagttgaacctttctttttacagagcagttttgaaacactctttttgtagaatctgcgaggggatatttggatagatttcagaatttcgttggaaacgggaatatcttcatataaaatctcgacagaagcattctcagaaacttctttgtgatatgtgcattcaagtcacagagttgaatattccctttcacagagtaggtttgaaacactctttttgtagtatctggaagtggacatttggagagccttgacgcctacggtgaaaagggaaatatcttcccataaaaactagacagaagcaatctcagaatcttctttgggatatatgcacgcagctaacagagttgaacatttctattgacagagcagttttgaaacagtctttctgtggaatctgcaagtggatatttggatagcttggaggattttgttggaaacgggattacgtataaaaagtagacagcagcatcctcagcaaacttctttgtgatgtgtgcattcaagtcacagagttgaacattccctttcgtacagcagttttgaaacactctttctgtagtaactggaagtgaacattaggacagctttcaggtctatggtgagaaaggaaatatcttcaaataaaaactagacaaaagcattctcataaacttgtttgtgatgtgtgaactcagctaacagagatggatctttcttttgatagagcagttctgaaaaacactttttgttgaatctgcaggtggacatttggatagatttgaagatttcgttggaaacgggaatatcttcatatcaaatctaggcagaagcattctcggaaacgtctttgtgatgtttgcattcaactcatagagttgaacattccgtttcagagagcagctttgaggcactcattttgtagtatgtgcaagtggatatctggagtgctctgaagcctttggtgaaaaagcaaatatcttcccataaccaccagacagaaacattctcagaaactcctttatgacgtatgcactcacctaacagagaaggaccttccttttgacagagcacttttgatacactctttttgtagaatctgcaagtggatattgggatagctgtgaagatttcattggaaacgggaatatcttcctataaaatctagacagaagcattctcagaaactgctctgtgatgtctgcattcatgtcacggagttgaccattgcctttcatagagcaggtttgaaacgctctttttgtagtatatggaagtggacgtttcggacggtttgaggcccatggtgataaagggaatatcttcccctacaagctagaaagaatcattctgtgaaacttgtttgtgatgtgtgtactcaagtaacagagttgaacctttctttttacagagcagttttgaaacactctttttgtagaatctgcgaggggatatttggagagatttcaggatttcgtgggaaacgggaatatcttcatataaaatctcgacagaagcattctcagaatcttctttgtgatatctgcattcaagtcacagagttgaatattccctttcacagagtaggtttgaaacactctttttgtagtatctggaagtggacatttggagcgccttgacgcctacggtgaaaagggaaatatcttcccataaaaactagacagaagcaatctcagaatcttctttgggatatatgcacgcagtttacagagttgaacctttctattgacagagcagttttgaaacagtctttctgtggaatctgcaagtggatatttggatagcttggaggatttcgttggaaacgggattacgtataaaaagtagacagcagcattctcagaaacttcgttgtgatgtgtgcattcatgtcacagagttcaacattccctttcatacagcaggtttcaaacactctttctgtagtatctggaagtgaacattatgagagttttcaggtctgcggtgagaaaggaaatatctaaaaataaaaactagacaggaagcattctcataaacttgtttgtgatgtctgaactcagctaacagaggtggatctttcttttgatagagcagttctgaaaaacactttttgttgagtctgcaagtggacatttggatagatttgaagatttcgttggaaacgggaatatcttcatatcaaatctagacagaagcattctcagaaacgtctttgtgatgtttacattcaactcatagagttgaacattccctttcagagagcagctttgaagcactctttttgtagcatgtgcaagtggacatttggagcgctctgaggcctacggggaaaaagcaaatatcttcccataaccactagacagaaaacattctcagaaactcctttatgacgtatgcactcacctagcagagaagaaccttccttttgacagagcagttttgatacactctttttgtagaatctgcaagtggatatttggatagctgtgaagatttcgtcggaaacgggaatatcttcctataaaatcttgacagaagcattctcagaaactgctctgtgatgtctgcattcaagtcacagagttgaacattgtctttcatagagcaggtttgaaacgctctttttgtagtatatggaagtagacgtttcggacggtttgaggcccatggtgataaagggaatatcttcccctacaagctagaaagaagcattctgtgaaacttgtttgtgaggtgtgtactcaactaacagagttgaacctttctttttacagagcagttttgaaacactctttttgtagaatatgtgaggggatatttggatagatttcaggatttcgttggaaacgggaatatcttcatataaaatctcgacagaagcattcgcagaaacttcttcgtgatatgtgcattcaagtcacagagttgaatattccctttcacagagtaggtttgaaacactctttttgtagtatctggaagtggacatttggagcgccttgatgcctatggtgaaaagggaaatatcttcccataaaaactagacagaagcaacctcagaatcttctttgggatgtatgcacccagctaacagaggtgaacctttctattgacagagcagttttgaaacactctttttgtggaatctgcaagtggatatttggatagcttggaggatttcgttggaaacgggattacgtatacaaagtagacagcagcatcctcagaaacatccttgtgatgtgtgcattgaagtcacagagttgaacattccctttcgtacagcagttttgaaacactctttctgtagtatctggaagtgaactttaggacagctttcaggtctatagtgagaaaggatatatcttcaaataaaaactagacagataagcattctcataaacttgtttgtgatgtgtgaactcagctaacagaggtggatctttcttttgatagagcagttctgaaaaacactttttgttgaatctgcaagtggacatttggatagatttgaatatttcgttggaaacgggaatatcgtcatatcaaatctagacagaagcattctcagaaacgtctttgcgatgtttgcattcaactcatagagttgaacattccgtttcagagagcagctttgaagcactctttttgtagtatgtgcaagtggatatttggagcgctctgaggcctacggtgaaaaagcaaatatcttctcataaccactagacagaaacattctcagaaactcctttatgacgtatgtactcaactaacaggagaagaaccttccttttgacagagcagttttgatacactctttttgtggaatctgcaagtggatatttggatagctgtgaagatttcgttggaaacgggaatatcttcctataaaatctagacagaaagcattctcagaaactgctctgtgatgtctgcattcaagtcacagagttgaacattgccgttcatagagcaggtttgaaacactctttttgtagtatatggaagtggacgtttcggacggtttgaggcccatggtgataaagggaatatcttcccctacaagctagaaagagcattctgtgaaacttgtttgtgatgtgtgtactcaactaacagagttgaacctttctttttacagagcagttttgaaacactctttttgtagaatctgcgaggggatatttggatagatttcaggatttcgttggaaaggggaatatcttcatataaaatcttgacagaagcattctctgaaacttctttgtgatatgtgcattcaagtcacagagttcaatattccctatcacagagtaggtttgaaacactctttttgtagtatctgaagtggacatttggagcgccttgacgcctacggtgaaaagggaaatatcttctcataaaaagtagacagaagcaatctcagaatcttctttgggatatatgtacgcagctaatagagttgaacctttctattgacagagcagttttgaaacagtctttctgtggaatctgtaagtggatatttggatagcttggaggatttcgttggaaacgggattacgtataaaaagtagacagcagcatcctcagaaacaaccttgtgatgtgtgcattcaagtcacagagttgaacattccctttcgtacagcagttttgaaacactctttctgtagtatctggaagtgaactttaggagagctttcaggtctatagtgagaaaggatatatcttcaaataaaaactagacagaagcattctgataaacttgtttgtgaagtgtgatctcagctaacagaggtggatctttcttttgatagagcagttctgaaaaacattttgttgaatctgcaagtggacatttggatagatttgaagatttcgttggaaacgggaatatcttcatatcaaatctagacagaagcattctcagaaacgtctttgtgatgtttgcattcaacccatagagttgaacattctgttacagagagcagctttgaagcgctctttttgtagtatgtgcaagtggatattttgagcgctctgaggcctaaggtgaaaaagcaaatatcttcccataaccactagacagaaacattctcagaaactcctttatgacgtatgcactcacataacagagaagaaccttccttttgacagagcagttttgatacactctttttgtagaatctgcaagtggatatttggatagctgtgaagatttcgttggaaacgggaatatcttcctataaaatctagacagaagcattctcagaaactgctctgtgatgtctgcattcaactcacagagttgaacattgccgttcatagagcaggtttgaaacactctttttgtagtatatggaagtggacgtttcggacggtttgaggcccatggtgataaagggaatatcttcccatacaagctagaaagaaacattctcagaaactcctttatgacgtatgtactcaactaacagagaagaaccttccttttgacagagcagttttgaaacactctttttgtagaatctgcgaggggatatttggatagctttcaggatttcattggaaacgggaatatcttcatataaaatctcgacagaagcattctcagaaacttctttgtgatatctgcattcaagtcacagagttgaatattccctttcagagagtaggtttgaaacactctttttgtagtatctggaagtggacatttggagcgccttgacacctacggtgaaaagggaaatatcttcccataaaaactagacagaagcaatctcagaatcttctttgggatatatgcacgcagctaaaagagttgaacctttctattgacagagcagttttgaaacagtctttctgtggaatctgcaagtggatatttggatagcttggaggatttcgttggaaacgggattacgtataaaaagtagacagcagcatcctcagaaacttctttgtgatgtgtgcattcaagtcacagagttgaacattccctttcgtacagcagttttgaaacactctttctgtagtatctggaagtgtacattaggacagctttcaggtctatggtgagaaaggaaatatcttcaaataaaaactagacagaagcattctcataaacttgtttgtgatgtgtgaactcagctaacagacgtggatctttcttttgatacagcagttttgaaaaacactttttgtagaatctgcaagtggacatttggatagatttgaagatttcgttggaaacgggaatatcttcatatcaaatctagacagaggcattctcagaaacgtctttgtgatgtttgcattcaactcatagagttgaacattccgtttcagagagcagctttgaggcactctttttgtagtatgtgcaagtggatatttggagcgcactgaggcctacggtgaaaaagcaaatatcttcccataaccactagacagaaaacattctcagaaactcctttatgacgtatgcactcacctaacagagaaaaaccttccttttgacagagcagttttgatacactctttttgtagaatctgcaagtggatatttggatagctgtgaagatttcgttggaaacgggaatatcttcctataaaatctagacagaagcattctcagaaactgctctgtgatgtctgcattcaagtcacagagttgaacattgcctttcctagagcaggtttgaaacgctctttttgtagtatatggaagtggacgtttcagacggtttgaggccgatggtgataaagggaatatcttcccctacaagctagaaagaagcattctgtgaaacttgtttgtgatgtgtgtactcaactaacagagttgaacctttctttttacagagcagttttgatacactctttttgtagaatctgcgaggggatatttggatagatttcaggatttcgttggaaacgggaatatcttcatataaaatctcgacagaagcattctcagaaacttctttgtgatatgtgcattcaagtcacagagctgaatattctgcctttcacagagtaggtttgaaacactctttttgtagtatctggaagtggacatttggagcgccttgacgcctacggtgaaaagggaaatatcttcccataaaaactagacagaagcaatcctcagaatcttctttgggatatatgcacgcagctaacagagttgaacctttctattgacagagcagttttgaaacagtctttctgtggaatctgcaagtggatatttggatagcttggaggatttcgttggaaacgggattacgtataaaaagtaagacagcagcatcctcagaaacttctttgtgatgtgtgcattcaagtcacagagttgaacattccctttcgtacagcagtattgaaacactctttctgtagtatctggaagtgaacattaggacagctttcaggtctatggtgagaaagtaaatatcttcaaataaaaactagacagaagcattctcataaagttgtttgtgatgtgtgaactcagctaacagaggtggatctttcttttgatagagcagttctgaaaaacactttttgttgaatctgcaagtggacatttggatagatttgaagatttcgttggaaacgggaatatcttcatatcaaatctagacagaagcattctcagaaacgtctttgtgatgtttgcattcaactcatagagttgaacattccctttcagagagcagctttgatgcactctttttgtagcatgtgcaagtggacatttggagcgccctgaggcctacggggaaaaagcaaatatcttcccataaccactagacagaaacattctcagaaacttctttatgacgtatgtactcaactagcagagaagaactttccttttgacagagcacttttgatacactctttttgtagaatctgcaagtggatatttggatagctgtgaagatttcgttggaaacgggaatatcttcctatgaaatctagacagaagcattctcagaaactgctctgtgatgtctgcattcacgtcacagagttgaacattgcctttcatagagcaggtttgaaacgctctttttgtagtatatggaagtggacgtttcggacggtttgaggcccatggtgataaagggaatatcttcccctacaagctagaaagaagaattgtgtgaaacttgtttgtgatgtgtgtactcaactaacagagttgaacctttcttttcacagagcagttttgaaacactctttttgtagaatctgcgaggggatatttggatagatttcaggatttcgttggaaacgggaatatcttcatataaaatctcgacagaagcattctcagaaacttctttgtgatatgtgcattcaagtcacagagttgaatattccctttcacagagtaggtttgaaacactctttttgtagtatctggaagtggacatttggagcgccttgacacctacggtgaaaagggaaatatttcccatgaaaactagacagaagcaatctcagaatcttctttggggatatatgcacgcagctaacagagttgaacctttctattgacagagcagttttgaaacagtctttctgtggaatctgcaagtggatatttggatagcttggaggatttcgttggaaacgggattacgcataaaaagtagacagcagcatcctcagaaacttctttgtgatgtgtgcattcaagtcacagagttgaacattccctttcgtacagcagttttgaaacactcttcctgtagtatctggaagtgaacattagaacagctttcagctctatggtgagaaaggaaatatcttcaaataaaaactagacagaagcattctgataaacttgtttgtgaagtgtgaactcagctaacagaggtggatctttcttttgatagagcagttctgaaaaacactttttgttgaatctgcaagtggacattttgatagaattgaagatttcgttggaaacgggaatatcttcatatcaaatctagacagaagcattctcagaaacgtctttgtgatgtttgcattcaactcatagagttgaacattccgtttcagaaagcagctttgaagcactctttttgtagtatgtgcaaggggatatttggagcgctctgaggcctaaggtgaaaaagcaaatatcttcccataaccactagacagaaacattctcagaaactcctttatgacgtatgtactcaactaacagagaagatccttccttttgacagagcagttttgatacactctttttgtagaatctgcaagtggatatttggatagctgtgaagatttcgttggaaacgggaatatcttcctataaaatctagacagaagcattctcagaaactgctctgtgatgtctgcattcaagtcacagagttgaacattgcctttcatagagcaggtttgaaacgctctttttgtagtatatggaagtggatgtttcggacggttggaggcccatggtgataaagggaatatcttcccgtacaagctagaaagaagcattctgtgaaacttgtttgtgatgtgtgtactcaactaacagagttgaacctttctttttacagagcagttttgaaacactctttttgtagaatctgcgaggggatatttggatagatttcaggatttcgttggtaacgggaatatcttcatataaaatctcgacagaagcattctcagaaacttctttgttatatgtgcattcgagtcacagagttgaatattccctttcacagagtaggtttgaaacactctttttgtagtatctggaagtggacatttggagcgccttgacacctacggtgaaaagggaaatatcttcccataaaaactagacagaagcaatctcagaatcttctttgcgatatatgcacgcagctaacagagttgaacttttctattgacagagcagttttgaaacagtctttctgtggaatctgcaagtggatatttggatagattggaggatttcgttggaaacgggattacgtataaaaagtagacagcagcgtcctcagaaacttctttgtgatgtgtgcattcaagtcacagagttgaacattccctttcgtacagcagttttgaaacactctttctgtagtatctggaagtgaacattaggacagctttcaggtctatggtgagaaaggaaatatcttcaaataaaaactagacagaagcattctcataaacttgtttgtgatgtgtgaactcagctaacacacgtggatctttcttttgatacagcagttttgaaaaacactttttgttgaatctgcaagtggacatttggatagatatgaagatttcgttggaaacgggaatatcttcacatcaaatctagacagaagcattctcagaaacgtctttgtgatgtttgcattcaactcatagagttgaacattccgtttcagagaccagctttgaagcactctttttgtagtatgtgcaagtggatatttggagcgctctgaggcctacggtgaaaaagcaaatatcttcccataaccactagacaggaacattctcagaaactcctttatgacgtatgcactcacctaacagagaagaaccttccttttgacagagcagttttgatacagtctttttgtagaatctgcaagtggatattgggatagctgtgaagatttcgttggaaacgggaatatcttcctataaaatctagacagaagcattctcagaaactgctctgtgatgtctgcattcaagtcacagagttgaacattgcctttcatagagcaggtttgaaacgctctttttgcagtatatggaagtggatgtttcggacggtttgaggcccatggtgataaagggaatatcttcccctacaagctagaaagaagcattctgtgaaacttgtttgtgatgtgtgtactcaactaacagagttgaacctttcttttcacagagcagttttgaaacactctttttgtacaatctgcgagcggatatttggatagatttcaggatttcgttggaaacgggaatatcttcatataaaatctcgacagaagcattctcagaaacttctttgtgatatcggcattcaagccacagagttgaatattccctttcacagagtaggtttgaaacactctttttgtagtatctggaagtggacatttggagcgccttgacacctacggtgaaaagggaaatatcttcccataaaaactagacagaaagcaatctcagaatcttctttgggatatatgcacgcagctaacagagttgaacctttctattgacagagcagttttgaaacagtctttctgtggaatctgcaagtggatatttggatagcttggaggatttcgttggaaacgggattacgcataaaaagtagacagagcatcctcagaaacttctttgtgatgtgtgcattcaagtcacagagttgaactttccctttcgtacagcagttttgaaacactctttctgtagtacctggaagtgaacattaggacagctttcaggtctatggtgagaaaggaaatatcttcaaataaaaactagacagaagcattctgataaacttgtttgtgaagtgtgaactcagctaacagaggtggatctttcttttgatacagcagttctgaaaaacactttttgttgaatctgcaagtggacatttggatagatttgaagatttcgttggaaacgggaatatcttcatatcaaatctagacagaagcatttctcggaaacgtctttgtgatgtttgcattcaactcatagagttgaacattccgtttcagagagcagctttgaagcactctttttgtagtatgtgcaagtggatatttggagcgctgtgaggcctgcagtgaaaaagcaaatatcttcccataaccactagactgaaacattctcagaaactcctttatgacgtatgcactcacctaacagagaagaaccttccttttgacagagcagttttgatacactctttttgtagaatctgcaagtggatatttggatacctgtgaatatttcgttggaaacgggaatatcttcctataaaatctagacagaagcattctcagaaactgctctgtgatgtctgcattcaagtcacagagttgaacattgcctttcatagagcaggtttgaaacgctctttttgtagtatatggaagtggacgtttcggacggtttgagtcccatggtgataaagggaatatcttcccccacaagctagaaagaagcattctgtgaaacttgtttgtgatgtgtgtacacaaccaacagagttgaacctttctttttacagagcagttttgaaacactctttttgtagaatctgcgaggggatatttggatagatttcaggatttcattggaaacgggaatatcttcatataaaatctcgacagaagcattctcagaaacttctttgtgatatgtgcattcaagtcagagagttgaatattccctttcacagagtaggtttgaaacactctttttgtagtatctggaagtggacatttggagcgccttgacgcctacggtgaaaagggaaatatcttcccataaaaactagacagaagtaatctcagaatcttctttgggatatatgcacggagctaacagagttgaacctttctattgacatagcagttttgaaacagtctttctgtggaatctgcaagtggatatttggatagcttggaggatttcgttggaaacgggattacgtataaaaagtagacagcagcatcctcagaaacttctttgtgatgtgtgcattcaagtcacagagttgaacattccctttcgtacagcagttttgaaacactctttctgtagtatctggaagtgaacattaggacagctttcaggtctatggtgagaagggaaatatcttccaataaaaactagacagaagcattctcataaacttgtttgtgatgtgtgaactcagctaacagagatgggtctttcttttgatagagcagttctgaaaaacactttttgttgaatctgcaagtggacatttggatagatttgaagatttcgttggaaacgggaatatcttcatatcaaatctagacagaagcattctcagaaacgtctttgggatgtttgcattcaactcatagagttgaacattccgtttcagagagcagtttgaggcactctttttgtagtatgtgcaagtggatatttggagcgctctgaggcctacggtgaaaaagcaaatatcttcccataaccactagacagaaacattctcagaaacttctttatgacgtatgtactcaactagcagataagaactttccttttgacagagcatttttgatacactctttttgtagtatctgcaagtggatatttggatagctgtgaagatttcgttggaaacgggaatatcttcctataaagtctggacagaagcattctcagaaactgctctgtgatgtctgcattcaagtcacagagttgaacattgcccttcatagagcaggtttgaaacgctctttttgtagtatatggaagtggacttatcggacggtttgaggcccatggtgataaagggaatatcttcccctacaagctagaaagaagcattctgtgaaacttgtttgtgaggtgtgtactcaactaacagagttgaacctttctttttacagagcagttttgaaacactctttttgtagaatctgcgaggggatatttggatagatttcaggatttggttggaaacgggaatatcttcatataaaatctcgacagaagcattctcagaaacttccttgtgatatgtgcattcaagtcacagagttgaatattccctttcacagagtaggtttgaaacactctttttgtagtatctggaagtggacatttggagcgccttgacgcctatggtgaaaagggaaatatcttcccataaaaactagacagaagcaatctcagaatcttctttgggatatatgcacgcagctaacagagttgaacctttctattgacagagcagttttgaaacagtctttctgtggaatctgcaagtggatatttggatagcttggaggatttcgttggaaacgggattacgtataaaaagtagaccgcagcatcctcagaaacatctttgtgatgtgggcattcaagtcacagagttgaacattccctttcgtacagcagttttgaaacactctttctgtagtatctggaagtgaacattaggacagctttcaggtctatggtgagaaaggaaatatcttcaaataaaaactagacagaagcattctcataaacttgtttgtgatgtgtgaactcagctaacagaggtggatctttcttttgatagagcagttctgaaaaacactttttgttgaatctgcaagtggacatttggaaagatttgaagatttcgttggaaacgggaatatcttcatatcaaatctagacagacgcattctcagaaacgtctttgtgatgtttgcattcaactcatagagttgaacattccgtttcagagagcagctttgaagcactccttttgtagtatgtgcaagtggatatttggtgcgctctgaggcctacggtgaaaaagcaaatatcttcccataaccactagacagaaacattctcagaaactcctttatgacgtatgtactcaactaacagagaagaaccttccttttgacagagcagttttgatacactctttttgtagaatctgcaagtggatatttggatagctgtgaagatttcgttggaagcgggaatatcttcctataaaatctagacagaagcattctcagaaactgctctgtgatgtctgcattcaagtcacagagttgaacattgcctttcatagagcaggtttgaaacgctctttttgtagtatatggaagtggatgtttcggacggttggaggcctatggtgataaagggaatatcttcccctacaagctagaaagaagcattctgtgaaacttgtttgtgatgtctgtactcaactaacagagttgaacctttcttttcacagagcagttttgaaacactctttttgtagaatctgcgaggggatatttggatagatttcaggatttcgttggaaacgggaatatcttcatataaaatctcgacagaagcattctcagaaacttcattgtgatatctgcattcaagtcacagagttgaatattccctttcagagagtaggtttgaaacactctttttgtagtatctggaagtggacatttgaagcgccttgacacctacggtgaaaagggaaatatcttcccataaaaactagacagaagcaatctcagaatcttctttgggatatatgcacgcagctaacagagttgaacctttctattgacagagcagttttgaaacagtctttctgtggaatctgcaagtggatatttggatagcttgaaggatttcgttggaaacgggattaagtataaaaagtagacagcagcatcctcagaaacttctttgtgatgtgtgcattcaagtcacagagttgaacattccctttcgtacagcagttttgaaacactctttctgtagtatctggaagtgaacattaggacagctttcaggtctacggtgagaaaggaaatatcttcaaataaaaactagacagaagcattctcataaacttgtttgtgatgtgtgaactcagctaacacacgtggatctttcttttgatagagcagttctgaaaaacaatttttgttgaatctgcaaggggacatttggatagatttgaagatttcgttggaaacgggaatatcttcatatcaaatctagacagaagcattctcagaaaggtctttgtgatgtttgcattcaactcatagagttgaacattcccttccagagagtagctttgaagcactctttttgtagcatgtgcaagtggacatttggagcgccctgaggcctacggggaaaaagcaaatatcttcccataaccactagacagaaacattctcagaaactcctttatgacgtatgcactcacctaacagaggagaaccttcctttcgacagagcagttttgatacactctttttgtagaatctgcaagtggatatttggatagctgtgaagatttcgttggaaacgggaatatcttcctataaaatctagacagaagcattctcagaaactgctctgtgatgtctgcattcaagtcacagagttgaacattgcctttcctagagcaggtttgaaacgctctttttgtagtatatggaagtggacgtttcggacggtttgaggcgcatggtgataaagggagtatcttcccctacaagctagaaagaagcattctgtgaaacttgtttgtgatgtgtgtactcaactaacagagttgaacctttctttttacagagcagttttgaaacactctttttgtagaatctgtgaggggatatttggatagatttcaggatttcgttggaaacgggaatatcctcatataaaatctcgacagaagcattctcagaaacttctttgggatatctgcattcaagtcacatagttgaatattccctttcacagagtaggtttcaaacactctttttgtagtatctggaagtggacatttggagcgccttgatgcctacggtgaaaagggaaatatcttcccataaaaactagacagaaggaatctcagaatcttctttgggatatatgcacgcagctaacagagttgaacctttctattgacagagcggttttgaaacagtctttctgtggaatctgcaagtggatatttggatagcttggaggatttcgttggaaacgggattaagtataaaaagtagacagcagcatcctcagaaacttctttgtgatgtgtgcattcaagtcacagagttgaacgttccctttcgtacagcagttttgaaacactctttctgtagtatctggaagtgaacattaggacagctttcaggtctatggtgagaaaggaaatatcttcaaatagaaactagacagaaagcattctcataaacttgtttgtgatgtgtgaactcagctaacagacgtggatctttcttttgatacagcagttttgaaaaacactttttgttgaatctgcaagtggacatttggatagatatgaagatttcgttggaaacgggaatatcttcatatcaaatctagacagagcattgtcagaaacgtccttgtgatgtttgcattcaactcatagagttgaacattccctttcagagagcagctttgaagcactctttttgtagtatgtgcaagtggatatttggagcgctctgaggcctaaggtgaaaaagcaaatatcttcccataaccactagacagaaacattctcagaaacttctttatgacgtatgtactcaactaacagagaagaaccttcctttttacagagcagtattgatacactctttttgtagactctgcaagtggatatttggatatcagtgaagaattcgttggaaacgggaatatcttcctataaaatctaaacagaagcattctcagaaactgctctgtgatgtctgcattcaagtcagagagttgaacattgcctttcacagaggaggtatgaaacgctcttttcgtaatatatggaagtggacgtttcggacggcttgatgcccatggagataaaggaaatatcttcccctacaagctagaaagaagcattctgtgaaacttgtttgtgatgtgtgtactcaactaacagagttgaacttttctttttacagagcagttttgaaacactctttttgtagaatctgcgaggggatatttggatagatttcaggatttcgttggaaaggggaatatcttcatataaaatctcgacagaagcattctcagaaacttctttgtgatatgtgcattcaagtcacagagttgaatattccctttcacagagtaggtttgaaacaatctttttgtagtatctggaagtggacatttggagcgccttgacgcctacggtgaaaagggaaatatcttcccataaaaactagacagaagcaatctcagaattatctttgggatatatgcacacagctaacagagttgaacttttctattgacatagcagttttgaaacagtctttctgtggaatctgcaagtggatatttggatagcttggaggatttcgttggaaatgggattacgtataaaaagtagacagcagcatcctcagcaaacttctttgtgatgtgtgcattcaagtcacagtgttgaacattccctttcgtacagcagttttgaaacactctttctgtagtatctggaagtgaacattaggacagctttcaggtctatggtgagaaaggaaatatcttcaaataaaaacaagacagaagcattctcataaacttgtttgtgatgtgtgaactcagctaacagaggtggatctttcttttgatagagcagttctgaaaaaaactttttgttgaatctgcaagtggacatttggatagatttgaagatttcgttggaaacgggaatatcttcatatcaaatctagacagaagcattctcagaaacgtctttgtgatgtttgcattcaactcatagagttgaacattccgtttcagagagcagctttgaagcactctttttgtagtatgtgcaagtggatatttggagcgctctgaggcctacgttgaaaaagcaaatatcttcccataaccactagacagaaacattctcagaaactcctttatgacgtatgcactcacctaacagagaagaaccttccttttgacagagcacttttcatacactctttttgtagaatctgaaagtggatatttggatagctgtgaagatttcgttggaaacgggaatatcttcctataaaatctagacagaagcattctcagaaacagctctgtgatgtctgcattcaagtcacagagttgaacattgcctttcatagagcaggtttgaaacgctctttttgaagtatatggaagtggacgtttcggacggtttgaggcccatggtgataaagggaatatcttcccctacaagctagaaagaagcattgtgtgaaacttgtttgtgatgtgtgtactccactaacagagttgaacctttctttttacagagcagttttgaaacactctttttgtagaatctgcgaggggatatttggatagatttcaggatttcgttggaaacgggaatatcttcatataaaatctcgacagaagcattctcagaaacttctttgtgatatctgcattcaagtcacagagttgaatattccctttcacagagtaggtttgaaacactctttttgtagtatctggaagtggacatttggagcgccttgacacctacggtgaaaagggaaatattttcccataaaaagtagacagaagcaatctcagaatcttcctttgggatatatgcacgcagctaacagagttgaacctttctattgacagagcagttttgaaacagtctttctgtggaatctgcaagtggatatttggatagcttggaggatttcgttggaaacgggattacgtataaaaagtagacagcagcattctgtgaaacttgtttgtgatgtgtgtactcaactaacagagttgaacctttctttttacagagcagttttgaaacactctttctgtagtatctggaagtgaacattaggacagctttcaggtctatggtgagaaaggaaatatcttcaaataaaaactagacagaagcattctcataaacttgtttgtgatgtgtgaactcagctaacaacggtggatctttcttttgatagagcagttctgaaaaacactttttgttgaatctgcaagtggacatttggatagttttgaagatttccttggaaaaaggaatatcttcatatcaaatctagacagaagcattctcagaaacgtctttgtgatgtttgcattcaactcatagagttgaacattccctttcagagagcagctttgaagcactctttttgtagtatgtgcaaggggatatttggagcgctgtgaggcctacggtgaaaaagcaaatatcttcccataaccactagacagaaacattctcagaaactcctttatgacgtatgcactcacctaacagagaagaaccttccttttgacagagcagttttgatacactctttttgtagaatctgcaagtggatatttggatatctgtgaagatttcgttggaaacgggaatatcttcctataaaatctagacagaatcattctcagaaactgctctgtgatgtctgcattcaagtcacagagttgaacattgcctttcctagagcaggtttgaaacgctctttttgtagtatatggaagtggacgtttcggacggtttgaggcccttggtgataaagggaatatcttcccctacaagctagaaagaagcattctgtgaaacttgtttgtgatgtgtgtactcaactaacagagttgaacctttctttttacagagcagttttgaaacactctttttgtagaatgtgcgaggggatatttggatagatttcaggatttcgttggaaacgggaatatcttcatataaaatctcgacagaatcattctcagaaacttctttgtgatatgtgcattcaagtcacagagttgaatattccctttcacagagtaggtttgaaacactctttttgtagtatctggaagtggacatttggagcgccttgacgcctacggtgaaaagggaaatatcttcccataaaaactagacagaagcaatctcagaatcctctttgggatacatgcacgcagctaacagagttgaacctttctattgacagagcagttttgaaacagtctttctgtggaatctgcaagtggatatttggatagcttggaggatttcgttggaaacaggattacgtataaaaagtagacagcagcatcctcagaaacttctttgtgatgtatgcattcaagtcccagagttgaacattccctttcgtacagcagttttgaaacactctttctgtagtatctggaagtgaacattaggacagctttcaggtctagggtgagaaaggaaataccttcaaataaaaactagacagaagcattctcataaacttgtttatgatgtctgaactcagctaacagaggtggatctttcttttgatagagcagttctgaaaaacactttttgttgaatctgcaagtggacatttggatagatttgaagatttcgttggaaacgtgaatatcttcaaatcaaatctagacagaagcattctcagaaaggtctttgtgatgtttgcattcaactcatagtagttgaacattcccttccagagagtagctttgaagcactctttttgtagcatgtgcaagtggacatttggagcgccctgaggcctacggggaaaaagcaaatatcttcccataaccactagacagaaacattctcagaaactcctttatgacgtatgcactcacctaacagagaagaaccttccttttgacagagcagttttgatacactctttttgtagaatctgcaagtttatattgggatagctgtgaagatttcgttggaaacgggaatatcttcctataaaatctagacagaagcattctcagaaactgctctgtgatgtctgcattcaagtcacagagttcaacattgcctttcctagagcaggtttgaaacgctctttttgtagtatatggaagtggacgtttcggacggtttgaggcccatggtgataaagggaatatcttcccctacaagctagaaagaagcattctgtgaaacttgtttgtgatgtgtgtactcaactaacagtgttgaacctttctttatacagagcagttttgaaacactctttttgtagaatctgcgaggggatatttggatagatttcaggatttcgttggaaacgggaatatcttcatataaaatctcgacagaagcattctcagaaacttctttgtgatatctgccttcaagtcacagagttgaatattccctttcacagagtaggtttgaaacactctttttgtagtatctggaagtggacatttggagggccttgacgcctacggtgaaaagggaaatatcttcccataaaaactagacagagaagcaatctcagaatcttctttgggatatatgcacgcagctaacatagttgaacctttctattgacagaacagttttgaaacagtgtttctgtggaatctgcaagtggatatttggatagcttggaggatttcgttggaaacgggattacgtataaaaagtagacagcagcatcctcagaaacttctttgtgatgtgtgcattcaagtcacagagttgaacattccctttagtacagcagttttgaaacactctttctgtagtatctggaagtgaacattaggacagctttcaggtctatggtgagaaaggaaatatcttcaaataaaaactagacagaagcattctgataaacttgtttgtgaagagtgatctcagctaacagaggtggatctttcttttgatagagcagttctgaaaaacactttgttgaatctgcaagtggacatttggatagatttgaagatttcgttggaaacgggaatatcttcatatcaaatctagacagaagcattctcagaaacgtctttgtgatgttggcattcaactcatagagttgaagattccctttcagagagcagctttgaagcactctttttgtagtatgtgcaaggggatatttggagcgctctgaggcctacggtgaaaaagcaaatatcttcccataaccactagacagaaacattctcagaaactcctttatgacgtatgcactcacctaacagaaaagaaccttccttttgacagagcagttttgatacactctttttgtagaatctgcaagtggatatttggatagctgtgaagatttcgttggaaacgggaatatcttcctataaactctagacagaagcattctcagaaactgctctgtgatgtctgcattcaagtcacagagctgaacattgcctttcatagagcaggtttgaaacactctttttgtagtatatggaagtggacgtttcggacggtttgaggcccatggtgataaagggaatatcttcccctacaagctagaaagaagcattctgtgaaacttgtttgtgatgtgtgtactcaactaacagagttgaacctttcgttttacagagcagtgttgaaccactctttctgtagaatctgcgaggggatatttggatagatttcaggatttccttggaaacgggaatatcttcatataaaatctcgacagaagcattctcagaaacttctttgtgatatctgcattcaagtcacagagttgaatattccctttcacagagtaggtttgaaacactctttttgtagtatctttaagtggacatttggagcgccttgacacctacggtgaaaagggaaatatcttcccataaaaactagacagaagcaatctcagaatcttctttgggatatatgcacgcagctaacagagttgaacctttctattgacagagcagttttgaaacagtctttctgtggaatctgcaagtggatatttggatagcttggaggatttcgttggaaacgggattacatataaaaagtagacagcagcatcctcagaaactcctttgtgatgtgtgcattcaagtcacagagttgaacattccctttcgtacagcagttttgaaacactctttctgtagtatctggaagtgaacattaggacagctttcaggtctatggtgagaaaggaaacatcttcaaataaaaactagacagaagcattctcataaacttgtttgtgatgtgtgaactcagctaacagaggtggatctttcttttgatacagcagttttgaaaaacactttttgttgaatctgcaagtggacatttggatagatttgaagatttcattggaaacgggaatatcttcatatcaaatctagacagaagcattctcagaaacgtctttgcgttgtttgcattcaactcatagagttgaacattccgtttcagaaagcagctttgaggcactctttttgtagtatgtgcaagtggatatttggagcgctctgaggcctacggtgaaaaagcaaatatcttcccataaccactagacagaaacattctcagaaactcctttatgacgtatgcactcacctaacagaaaagaaccttccttttgacagagcagttttgatacactctttttgtagaatctgcaagtggatatttggatagctgtgaagatttcgttggaaacgggaatatattcctataaaatctagacagaagcattctcagaaactgctactgtgatgtctgcattcaagtcacagagttgaacattgcctttcatagagcaggtttcaagcactctttttttagtatatggaagtggacgtttcggacggtttgaggcccatggtgataaaggaaatatcttcccctacaagctagaaagaagcattctgtgaaacttgtttgtgatgtgtgtactcaactaacagagttgaacctttctttttacagagcagttttgaaacactctttttgtagaatctgcgagggcatatttggatagatttcaggatttcgttggaaatgggaatatcttcatataaaatctcgacagaagcattctcagaagcttctttgtgatatgtgcattcaagtcacagagttgaatattccctttcacagagtaggtttgaaacactctttttgtagtatctggaagtggacattgggagtgccttgacgcctacggtgaaaagggaaatatcttctcataaaaagtagacagaagcaatctcagaatctgttttgggatatatgcacgcagctaacagagttgaacctttctattgacagagcagttttgaaacagtctttctgtggaatctgcaagtggatatttggatagcttggaggatttcgttggaaacgggattacgtataaaaagtagacagcagcatcctcagaaacttctttgtgatgtgtgcattcaagtcacagagttgaacattccctttcgtacagcagttttgaaacactctttctgtagtatctggaagtgaactttaggagagctttcaggtctatagtgagaaaggatatatcttcaaataaaagctagacagaagcattctcataaacttgtttgtgatgtgtgaactcagctaacagaggtggatctttcttttgatagagcagttctgaaaaacactttttgttggatctgcaagtggacatttggatagatttgaagatttcattggaaacgggaatatctttatatcaaatctagacagaagcattctcagaaacttctttgtgatgtttgcattcaactcatagagttgaacattcactttcagagagcagctttgaagcactctttttgtagtatgtgcaagtggatgttttgatcgctctgtggcctacggtgaaaaagcaaatatcttcccataaccactagacagaaacattctcagaaactcctttatgacgtatgccctcacctaacagagaataaccttccttttgacagagcatttttgatacactctttttgtagcatctgcaagtggatatttggatagctgtgaagatttctttggaaacgggaatatcttcctataaaatctagacagaagcattctcagaaactgctctgtgatgtctgcattcaagtcacagagttgaacattgcctttcatagagcaggtttgaaacgctctttttgtaggatatggaagtggacttatcggacggttggaggcccatggtgataaagggaatatcttcccctacaagctagaaagaagcattctgtgaaacttctttgtgatgtgtgtactcaactaacagagttgaacctttcttttcacagagctgttttgaaacactctttttataaaatctgcgaggggatatttggatagatttcaggatttcgttggaaacgggaatatcttcatataaaatctcgacagaagcattctcagaaacttctttgtgatatctgcctttaagtcacagagttgaatattccctttcacagagtaggtttgaaacactctttttgtagtatctggaagtggacatttggagcgccttgtcacctacggtgaaaagggaaatatcttcccataaaaactagacagaagcaatctcagaatcttctttgggatatatgcacgcagctaacagagttgaacctttctattgacagagcagttttgaaacagtctttctgtggaatctgcaagtggatatttggatagattggaggatttcgttggaaacgggattacgtataaaaagtggacagcagcatcctgagaaacttccttgtgatgtgtgcattcaagtcacagagttgaatattccctttcgtacagcagttttgaaacactctttctgtagtatctggaagtgaactttaggagagctttcaggtctatagtgagaaaggatatatcttcaaataaaaactagacagaagcattctcataaacttgtttgtgatgtgtgaactcagctaacagaggtggatctttcttttgatagagcagttctgaaaaacactttttgttgaatctgcaagtggacatttcgatagatttgaagatttcgctggaaacgggaatatcttcatatcaaatctagacagaagcattctcagaaacgtctttgcgatgtttgcattcaactcatagagttgaacattccgtttcagagagcagtatgaggcactctttttgtagtatgtgcaagtggatatttggagcgctctgaggcctacggtgaaaaagcaaatatcttcccataaccactagacagaaacattctcagaaactgctttatgacgtatgcactcacctaacagagaagaaccttccttttgacagagcagttttgacacactctttttgtagaatctgcaagtggatatttggatagctgtgaagatttcgttggaaacgggaatatcttcctataaaatctagacagaagcattctcagaaactgctctgtgatgtctgcattcaagtcacagagttgaacattgcctttcatagagcaggttggaaatgctctttttgtagtatatggaagtggacgtttcagacggtttgaggcccatggtgataaagggaatatcttccactacaagctagaaagaagcattctgtgaaacttgtttgtgatgtgtgtactcaactaacagagttgaacctttctttttacagagcagttttgaaacactctttttgtagaatctgcgaggggatatttggatacatttcaggattttgttggaaacgggaatatcttcatataaaatctcgacagaagcattctcagaaacttctttgtgatatgtgcattcaagtcacagagttgaatattccctttcacagagtaggtttgaaacactctttttgtagtatctggaagtggacatttggagcgcgttgacacctacggtgaaaagggaaatatcttcccataaaaactagacagaagcaatctcagaatcttctttgggatatatgcacgcagctaacagagttgaacctttctattgacagagcagttttgaaacagtctttctgtggaatctgcaagtggatatttggatagcttggaggatttcgctggaaacgggattacgtataaaaagtagacagcaacatcctcagaaccttctttgtgatgtgtgcattcaagtcacagagttgaacattccctttcgtacagcagtttttaaacactctttctgtggtatctggaagtgaacattaggacagctttcaggtctatggtgagaaaggaaatatcttcaaataaaaactagacagaagcattctcataaacttgtttgtgatgtgtgaactcagctaacagaggtggatctttcttttgatagagcagttctgaaaaacactttttgttgaatctgcaagtggacatttggatagatttgaagatttcgttggaaacgggaatatctccatatcaaatctagacagaagcattctcagaaacgtctttgtgatgtttgcattcaactcatagagttgaacattccgtttcagagagcagctttgaagcactctttttgtagtatgtgaaagtggatatttggagcgctgtgaggcctaaggtgaaaaagcaaatatcttcccgtaaccactagacagaaacattctcagaaactcctttatgacgtgtgcactcacctaacagagaagaactttccttttgacagagcagttttgatacactctttttgtagaatctgcaagtggatatttggatagctgtgaagatttcgttggaaacgggaatatcttcctataaaatctagacagaagcattctcagaaactgctctgtgatgtctgcattcaagtcacagagttgaacattgcctttcatagagcaggtttgaaacactctttttgtagtatatgcaagtggacgtttcggacggtttgaggcccatggtgataaagggaatatcttcccctacaagctagaaagaagcattctgtgaaacttgtttgtgatgtgtgtactcaactaacagagttgaacctttctttttacagagcagttttgaaacactctttttgtagaatctgcgagtggatatttggatacatttcaggatttcgttggaaacgggaatatcttcatataaaatctcgacagaagcattctcagaaacttctttgtgatatgtgcattcaagtcacagagttgaatattccctttcgcagagtaggtttgaaacactctttttgtagtatctggaagtggacatttggagtgccttgacgcctacggtgaaaagggaaatatcttcccataaaaactagacagaagcaatctcagaatcttctttgggatatatgcacgcagctaacagagttgaacctttctatggacagagtagttttgaaatagtctttctgtggaatctgcaagtggatatttggatagcttggaggatttcgttggaaacgggattacgtataaaaagtagacagcagcattctcagaaactgctctgtgatgtctgcattcaagtcacagtagttgaacattccctttcatacagcagttttgaaacactctttctgtagtatctggaagtgaacattaggacagctttcaggtctatggtgagaaaggaaatatcttcaaataaaaactagacagaagcattctcataaacttgtttgtgatgtgtgaactcagctaacagaggtggatctttcttttgatagagcagttgtgaaaaacactttttgttgaatctgcaagtggacatttggatagatttgaagatttcgttggaaacgggaatatcttcatatcaaatctagacagaagcattctcagaaacgtctttgtgatgtttgcattcaactcatagagttgaacattcagcttcagagagcaccttttaagcactctttttgtagtatgtgcaagtggatatttagagcgctgtgaggcctacggtgaaaaagcaaatatcttcccataaccactagacagaaacattctcagaaactcctttatgacgtatgcactcacctaacagagaagaaccttccttttgacagagcagttttgatacactctttttgtagaatctgcaagtggatatttggatagctgtgaagatttcgatggaatcgggaatatcttcctacaaaatctagacagaagcattctcagaaactgctctgtgatgtctgcattcaagtcacagagttgaacattgcctttcatagagcaggtttgaaatgctctttttgtagtatatggaagtggacttatcggacggtttgaggcccatggtgataaagggaatatcttcccctacaagctagaaagaagcattgtgtgaaagttgtttgtgatgtgtgtactcaactaacagagttgaacctttctttttacagagcagttttgaaacactctttttgtagaatctgcgaggggatatttggatacatttcaggatttcgttggaaacgggaatatcttcatataaaatctcgacagaagcattctcagaagcttctttgtgatatgtgcattcaagtcacagagttgaatattccctttcacagagtaggtttgaaacactctttttgtagtatctggaagtggacatttagagcgccttgacgcctacggtgaaaagggaaatatcttctcataaaaagtagacagaagcaatctcagaatcttctttgggatatgtgcacgcagctaacagagttgaacctttctattgacagagcagttttgaaacagtctttctgtggaatctgcaagtggatatttggatagcttggaggatttcgttggaaacgggattacgtataaaaagtagacagcagcatcctcagaaacttctttgtgatgtgtgcattcaagtcacagagttcaacattccctttcgtacagcagttttgaaacactctttctgtagtaactggaagtgaacattaggacagctttcaggtctatggtgagaaaggaaatatcttcaaataaaaactagacagaagcattttcataaacttgtttgtgatgtgtgaactcagctaacagaggtggatctttcttttgatagagcagttctgaaaaacactttttgttgaatctgcaagtggacatttagatagatttgaagatttcgttggaaacgggaatatcttcatatcaaatctatacagaagcattctcagaaacgtctttgtgatgtttgcattcaactcatagagttgaacattccgtttcagagagcagctttgaggcacactttttgtagtatgtgcaagtggatatttggagagctctgaggcctacggtgaaaaagcaaatatcttcccataaccactagacagaaacattctcagaaactcctttatgacgtatgcactcacctaacagagaacaaccttccttttgacagagcagttttgatacactctttttgtagaatctgcaagtggatatttggatagctgtgaagatttcgttggaaacgggaatatcttcctataaaatctagacagaagcattctcagaaacttctttgtgatatctgcattcaagtcacagagttgaatattccgtttcacagagtaggtttgaaacactctttttgtagtatctggaagtggacatttggagcgccttgacgcctacggtgaaaagggaaatatcttctcataaaaagtagacacaagcaatctcagaatcttctttgggatatatgcacgcagctaacagagttgaacctttctattgacagagcagttttgaaacagtctttctgtggaatctgcaagtggatatttgcatagcttggaggatttcgttggaaacgggattacgtataaaaagtagacagcagcatcctcagaaacttctttgtgatgtgtgcattcaagtaacagagttgaacattccctttcgtacagcagttttgaaacactctttctgtagtatctggaagtgaacattaggacagctttcaggtctatggtgagaaaggaaatatcttcaaataaaaactagacagaagcattctcataaacttgtttgtgatgtgtgaactcagctaacagaggtggatctttcttttgatagagcagttctgaaaaacactttttgttgaatctgcaagtggacatttggatagatttgaagatttcgttggaaacgagaatatcttcatatcaaatctagacagaagcattctcagaaacgtctttgtgatgtttgcattcaactcatagagttgaacattccgtttcagagagcagctttgaggcactctttttgtagtttgtgcaagtggatatttggagcgctctgaggcctacggtgaaaaagcaaatatcttcccataaccactagacagaaacattctcagaaactcctttatgacgtatgtactcaactaacagagaagaaccttccttttgacagagcagttttgatacactctttttgtagaatctgcaagtggatatttggatagctgtgaagatttcgtttgaaacgggaatatcttcctataaaatctagacggaagcattctcagaaactgctctgtgatgtctgcattcaagtcacagagttgaacattgcctttcatagagcaggtttgaaacgctctttttgtagtatatggaagtggacgtttcggacggtctgaggcccatggtgataaagggaatatcttcccctacaagctagaaagaagcattctgtgaaacttgtttgtgatgtgtgtactcaactaacagaattgaacctttcttttcacagagcagttttgaaacactctttttgtagaatctgcgaggggatatttggatagatttcagcatttcgttggaaacgggaatatcttcatataaaatctcgacagaagcattctcagaaacttctttgtgatatgtgcattcaagtcacagagttgaatattccctttcacagagtaggtttgaaacactctttttgaggtatctggaagtggatatttggagcgccttgacgcctacggtgaaaagggaaatatcttcccataaaaactagacagcagaaatctcagaatcttctttgggatatatgcacgcagctaacagagttgaacctttctattgacagagcagttttgaaacagtctttctgtggaatctgcaattggatatttggatagcttggaggatttcgttggaaacgggattacgtataaaaagtagacagcagcatcctcagaaacttctttgtgatgtgtgcattcaagtcacagagttgaacttccctttcgtacagcagttttgaaacactctttctgtagtaactggaagtgaacattaggacagctttcaggtctatggtgagaaaggaaatatcttcaaataaaaactagacagaagcattctcataaacttgtttgtgatgtgtgaactcagctaacagaggtggatctttcttttgatggagcagttctgaaaaacactttttgttgaatctgcaagtgcacatttggatagatttgaagatttcgttggaaacgggaatatcttcatatcaaatctagacagaagcattctcagaaacgtctttgtgatgtttgcattcaactcatagagttgaacattccgtttcagagaccagctttgaagcactctttttgtagtatgtgcaagtggatatttggagcgctctgtggcctacggtgaaaaagcaaatatcttcccataaccactagacagaaacattctcagaaactcctttatgacgtatgcactcacctaacagagaagaaccttccttttgacagagcagttttgatacactctttttgttgaatctgcaagtggatatttggatagctgtgaagatttcgttggaaacgggaatatcttcctataaaatctagacagaagcattctcagcaaactgctctgtgatgtctgcattcaagtcacagagttgaacattgtctttcatagagcaggtttgaagcgttctttttgtagtatatggaagtggacgtttcggacggtttgaggcccatggtgataaagggaatatcttcccctacaagctagaaagaagcattctgtgaaacttgtttctgatgtgtgtactcaactaacagagttgaacctttctttttacagagcagttttgaaacactctttttgtagaatctgcgaggggatatttggatagatttcaggattttgttggaaacgggaatatcttcatataaaatctcgacagaagcattctcagaaacttctttgtgatatctgcattcaagtcacagagttgaatattccctttcacagagtaggtttgaaacactctttttgtagtatctggaagtggacatttggagcgccttgacgcctatggtgaaaagggaaatatcttcccataaaaactagacagaagcaatctcagaatcttctttgggatatatgcacgcagctaacagagttgaacctttctattgacagagcagtattgaaacagtctttttgtgaaatctgcaagtggatatttggatagcttggaggatttcgttggaaacgggattacgtataaaaagtagacagcagcatcctcagaaacttctttgtgatgtgtgcattcaagtcacagagttgaacattccctttcgtacagcagttttaaaacactctttctgtagtatctggaagtgaacattaggacagctttcaggtctatggtgagaaaggaaatatcttcaaataaaaactacacagaagcattctcataaacttgtttgtgatgtgtgaactcagctaacagaggtggatctttcttttgatagagcagttctgaaaaacactttttgtagaatctgcaagtggacatttggatagatttgcagatttcgttggtaacgggaatatcttcatatcaaatctagacagaagcattctcagaaacgtctttgtgatgtttgcattcaactcatagagttgaacattccgtttcagagagcaggtttgaagcaatctttttgtagtatgtgcaagtggacatttggagcgctctgaggcctacggtgaaaaagcaaatatcttcccataaccactagacagaaacattctcagaaactcctttatgacgtatgcactcacctaacagagaagaaccttccttttgactgagcagtttgatacactctttttgtagaatctgaaagtggatatttggatagctgtgaagatttcgttggaaacgggaatatcttcctataaaatctagacagaagcattctcagaaactgctctgtgatgtctgcattcaactcacagagttgaacattgcctttcatagagcaggtttgaaacactctttttgtagtaaatggaagtggacgtttcggacggtttgaggcccatggtgataaagggaatatcttcccctacaagctagaaagaagcaatctcagaattttctttgggatatacgcacacagctaacagagttgaacttttctattgacatagcagttttgaaacagtctttctgtggaatctgcaagtagatattttgatagcttggaggatttcgttggaaacgggattacgtataaaaattagacagcagcatcctcagaaacttctttgtgaagtttctgcattctagtcacagagttgaacattccctttcgtacagcagttttgtatctggaagtggacatttggagcgccttgacacctacggtgaaaagggaaatatcttcccataaaaactagacagaagcaatctcagaatcttctttgggatatatgcacgcagctaacagagttgaacctttctattgacagagcagttttgaaacagtctttctgtggaatctgcaagtggatatttggatagcttggaggatttctttggaaacgggattacgtgtaaaaagtagacagcagcatcctcagaaacatccttgtgatgtgtgcattcaagtcacagagttgaacattccctatcgtacagcagttttgaaacactctttctgtagtatctggaagtgaactttaggacagctttcaggtctatagtgagaaaggatatatcttcaaataaaaactagacagaagcattctcataaacttgtttgtgatgtgtgaactcagctaacagaggtggatctttcttttgatagagcagttctgaaaaacacttcttgttgaatctgcaagtggacatttggatagatttgaagatttcattggaaacgggaatatcttcatatcaaatctagacagaagcattctcagaaacgtctttgtcatgtttgcattcaactcatagagttgaacattccctttcagagagcagctttgaaacactctttttgaagtatgtgcaagtggatatttggagcgctctgaggcctacgctgaaaaagcaaatatcttcccataaccactagacagaaacattctcagaaactcctttatgacgtatggcactcacctaacagaaaagaaccttccttttgacagagcagttttgatacactctttttgtagaatctgcaagtggatatttggatagctgtgaagatttcgttggaaacgggaatatcttcctataaaatctagacagaagcattctcagaaactgctctgtgatgtctgcattcaagtcacagagttgaacattgcctttcatagagcaggtttgaaacactctttttgtagtatatggaagtggacatttcggaaggtttgaggcccatggtgataaagggaatatcttcccctacaagctagaaagaagcattctgtgaaacttgtttgtgatgtgtgtactgaactaacagagttgaacctttctttttacagagcagttttgaaacactctttttgtagaatctgcgaggggatatttggagagatttcaggatttcgttggaaacgggaatatcttcatataaaatctcgacagaagcattctcagaaacatctttgtgatatctgcattcaagtcacagagttgcatattccctttcacagagtaggttttaaacactctttttgtagtatctggaagtggacatttggagtgccttgacgtctacggtgaaaagggaaatatcttcccataaaaactagacagaagcaatctcagaattttctttgggatatatgcacacagctaacagagttgaacttttctattgacatagcagttttgaaacagtctttctgtggaatctgcaagtggatatttggatagcttggaggatttcgttggaaacgggattacggtataaaaagtagacagcagcatcctcaggaacttctttgtgatgtgtgcattcaagtcacagagttgaacattcccttccgtacagcagttttgaaacactctttctgtagtatctggaagtgaacattaggacagctttcaggtctatggtgagaaaggaaatatcttcaaataaaaactagacagaagcattctcataaacttgtttgtgatgtgtgaactcagctaacagaggtggatctttcttttgatacagcagttctgaaaaacactttttgttgaatctgcaagtggacattaggatagatttgaagatttcgttggaaacgggaatatcttcatatcaaatctagacagaagcattctcagaaacgtctttgtgatgtttgcattcaactcatagagttgaacattccgtttcagagagcagctttgaagcactctttttgtagtatgtgcaagtggatatttggagcgctgtgaggcctaaggtgaaaaagcaaatatcttcccgtaaccactagacagaaacattctcagaaactcctttatgacgtatgcactcacctaacagagaagaaccttccttgtgacagagcagttttgatacactttttttgtagaatctgcaagtggatatttggatagctgtgaagatttcgttggaaacgggaatatcttcctataaaatctagacagaagcattctcagaaactgctctgtgatgtctgcattcaagtcacagagttgaacattgcctttcctagaacaggtttgaaacgctctttttgtagtatatggaagtggacgtttcggacggtttgaggcccatgctgataaagggaatatcttcccctacaagatagaaagaagcattctgtgaaactagtttgtgatgtgtgtactcaactaacagagttgaacctttctttttacagagcagttttgaaacactctttttgtagaatctgcgaggggatatttggatacatttcagcatttcgttggaaacgggaatatcttcatataaaatctcgacagaagcattctcagaaacttctttgtgatatctgcattcaagtcacagagttgaatattccctttcacagagtaggtttgaaacactctttttgtagtatctggaagtggacatttggagcgccttgacgcctacggtgaaaagggaaatatcttcccattaaaactagagagaagcaatctcagaatcttctttgggatatatgcactcagctaacagagttgaacctttctattgacagagcagttttgaaacagtctttctgtggaatctgcaagtggatatttggatagcttggaggatttcgttggaaacgggattacgtataaaaagtagacagcagcatcctccgaaacttctttgtgatgtgtgcattcaagtcacagagttgaacattccttttcgtacagcagttttgaaacactctttctgtagtatctggaagtgaacattaggacagctttcaggtctatggtgagaaaggaaatatcttcaaataaaaactagacagaagcattctcataaacttgtttgtgatgtgtgaactcagctaacagaggtggatctttcttttgatagagcagttctgaaaaacactttttgttgaatctgcaagtggacatttggatagatttgaagatttcgttggaaacgggaatatcttcatatcaaatctagaaagaagcattctcagaaacgtctttgtgatgtttgcattcaactcatagagttgaacattccctttcagagagcagctttgaagcactctttttgtagcatgtgtaagtggacatttggagcgccctgaggcctacggggaaaaaggaaatatcttcccataaccactagagagaaacattctcagaaactcctttatgacgtatgtactcaactgacagagaagaaccttccttttgacagagcagttttgatacactctttttgtagaatctgcaagtggatatttggatagctgtgaagatttcgttggaaacgggaatatcttcctataaaatctagacagaagcattctcagaaactgctctgtgatgtctgcattcaagtcacagagttgaacattgcctttcctagagcagggttgaaacgctctttttgtagtatatggaagtggacgtttcggacggtttgaggcccatggtgataaagggaatatcttcccctacaagctagaaagaagcattctgtgaaacttgtttgtgatgtgtgtactcaactaacagagttgaacctttctttttacagagcagttttgaaacactctttttgtagaatctgcgaggggatatttcgatagatttcaggatttcgttggaaacggtaatatcttcatataaaatctcgacagaaacattctcagaaacttcattgtgatatctgcattcaagtcacagagttgaatattccctttcagagagtaggtttgaaacactctttttgtagtatctggaagtggacatttggagcgccttgacacctacggtgaaaagggaaatatcttcccataaaaacgagacagaagcaatctcagaatcttctttgggatatatgcacgcagctaacagagttgaacctttctattgacagagcagttttgtaacagtctttctgtggaatctgcaagtggatatttggatagcttggaggatttcgttggaaacgggattacctataaaaagtagacagcagcatcctcagaaacttctttgtgatgtgtgcattcaagtcacagagttaaatattccctttcgtacagcagttttgaaaaactctttctgtagtatctggaagtgaacattaggacagcattcaggtctatggtgagaaaggaaatatcttcaaataaaaactagacagaagcattctcataaacttgtttgtgatgtgtgaactcagctaacagaggtggatctttcttttgatagagcagttctgaaaaacactttttgttgaatctgcaagtggacatttggatagatttgaagatttcgttggaaacgggaatatcttcatatcaaatctagacaaaaagcattctcagaaacgtctttgtgatgtttgcattcaactcatagagttgaacattcccttccagagagtagctttgaagcactctttttgtagcatgtgcaagtggacatttggagcgccctgaggcctacggggaaaaagcaaatatcttcccataaccactagacagaaacattctcagaaactcctttatgacgtatgcactcacctaacagagaagaaccttccttttgacagagcagttttgatacactctttttgtagaatctgccagtggatatttggatagctgtgaagatttcgttggaaacgggaatatcttcatatcaaatctagacagaaagcattctcagaaactgctctgtgatgtctgcattcaagtcacagagttgaacattgcctttcatagagcaggtttgaaacgctctttttgtagtatatggaagtggacttatcggacggtttgaggcccatggtgataaagggaatatcttcccctacaagctagaaagaagcattctgtgaaacttgtttgtgaagtgtgtactcaactaacagagttgaacctttctttttacagagcagttttgaaacactctttttgtagaatctgcgaggggatatttggatagatttcaggatttcattggaaacgggaatatcttcatataaaatctcgacagaagcattctcagaaacttctttgtgatatgtgcattcaagtcacagagttgaatattccctttcacagagtaggtttgaaacactctttttgtagaatctggaagtggacatttggagcgccttgacacctacggtgaaaagggaaatatcttcccataaaaactaaacagaagcaatctcagaattttctttgggatatatgcacacagctaacagagttgaacttttctattgacagagcagttttgaaacagtctttctgtggaatctgcaagtggatatttggatagcttggaggatttcgttggaaacaggattacgtataaaaagtagacagcagcatcctcagaaacttctttgagatgtgtgcattcaagtcacagagttgaacattccctttcgtacagcagttttgaaacactctttctgtagtatctggaagtgaacattaggacagctttcagctctatggtgagaaaggaaatatcttcaaataaaaactagacagaagcattctcataaacttgtttgtgatgggtgaactcagctaacagaggtggatctttcttttgatagagcagttctgaaaaacactttttgttgaatctgcaagtggacatttggatagatttgaagatttcgttggaaacgggaataccttcatatcaaatctagacagaagcattctcagaaacgtatttgtgatgtttgcattcaactcacagagttgaacattccctttcagagcgcagctttgaagcactctttttgtagtatgtgcaaggggatatttggagcgctctgaggcctacggtgaaaaagcaaatatcttcccataaccactagacagaaacattctcagaaactcctttatgacgtatgtactcaactaacagagaagaaccttccttttgacagagcagttttgatacactctttttgtagaatctgcaagtggatatttggatagctgtgaaggtttcgttggaaacgggaatatcttcctataaaatctagacagaagcattctcagaaactgctctgtgatgtctgcattcaagtcacagagttgaacattgcctttcatagagcaggtttgaaacgctctttttgtagtatatggaagtggacttttcggacagtttgaggcccatggtgataaagggaatatcttcccctacaagctagaaagaagcattctgtgaaacttgtttgtgatgtgtgtactcaactaagagagttgaacctttcttttcacagagcagttttgaaacactccttttgtagaatctgcgaggggatattaggatagatttcaggatttcgttggaaacgggaatatcttcatacaaaatctcgacagaagcattctcagaaacttctttgtgatatgtgcattcaagtcacagagttgaatattccctttcacagagtaggtttgaagcactctttttgtagtatctggaagtggacatttggagcgccttgacacctacggtgaaaagggaaatatcttcccataaaaactagacagaaagcaatctcagaatcttctttgggatatatgcacgcagctaacagagttgaacctttctattgacagagcagttttgaaacagtctttctgtggaatctgtaagtggatatttggatagcttggaggatttcgttggtaacgggattacgtataaaaattagacagcagcatcctcagaaacttctttgtgatgtgtgcattcaagtcacagagttgaacattccctttcgtacagcagttttgaaacactctttctgtagtatctggaagtgaacattaggacagctttcaggtctatcgtgagaaaggaaatatcttcaaataaaaactagacagaagcattctcataaacctgtttctgatgtgtgaactcagctaacagaggtggatctttcttttgatagagcagttctgaaaaacactttttgttgaatctgcaagtggacatttggatagatttgaagatttcgttggaaacgggaatatcttcatatcaaatctagacggaagcattctcagaaacgtttttgtgatgtttgcattcaactcatagagttgaacattccgtttcagagagcagctttgaagcactctttttgtagtatgtgcaagtggatatttggagcgctctgaggcctacggtgaaaaagcaaatatcttcccataaccactagacagaaacattctcagaaactcctttatgacgtgtgcactcacctaacagagaagaaccttccttttgaaagagcagttttgatacactctttttgtagaatctgcaagtggatatttggatagctgtgaagatttcgttggaaacgggaatatcttcctataaaatctagacagaagcattctcagaaactgctctgtgatgtctgcattcaagtcacagagttgaacattgcctttcatagagcaggtttgaaacgctctttttgtagtatatggaagtggactttttggacggtttgaggcccatggtgataaagggaatatcttcccctacaagctagaaagaagcattctgtgaaacttgtttgtgatgtgtgtactcaactaacagagttgaacctttctttttacagagcagttttgaaacactctttttgtagaatctgtgaggggatatttggatagatttcaggatttcgttggaaacgggaatatcttcatagaaaatctcgacagaagcattctcagaaacttctttgtgatatgtgcattcaagtcacagagttcaatattccctttcacagagtaggtttgaaacactctttttgtagtatctggaagtggacatttggagcgccttgacgcctacggtgaaaagggaaatatcttcccataaaaactagacagaagcaatctcagaatcttctttgggatatatgcacgcagctaacagagttgaacctttctattgacagagcagttttgaaacagtctttctgtggaatctccaagtggatatttggatagcttggaggatttcgttggaaacgggattacgtataaaaagtagacagcagcatcctcagaaacttctttgtgatgtgtgcattcaagtcacagagttgaacattccctttcgtacagcagttttgaaacactctttctgtagtatctggaagtgaacattaggacagctttcaggtctatggtgaggaaggaaatatcttcaaataaaaactaggcagaagcattctcataaacttgttttgatgtctgaactcagctaacagaggtggatctttcttttgatagagcagttctgaaaaacactttttgttgaatctgcaagtggacatttggatagatttgaagatttcgttggaaacgggaatatcttcatatcaaatctagacagaagcattctcagaaacgtctttgtgatgtttgcattcaactcatagagttgaacattccctttgagagagcagctttgaagcactctttttgtagcatgtgcaagtggacatttggagcgccctgaggcctacggggaaaaagcaaatatcttcccataaccactagacagaaacattctcagaaactcctttatgacgtatgtactcaactaacagagaagaaccttccttttgacagagcagttttgatacactctttttgtagaatctgcaagtggatatttggatagctttgaagatttcgttggaaacgggaatatcttcctataaaatctagacagaagcattctcagaaactgctctgtgatgtctgcattcaagtcacagagttgaacattgcttttcctagagcaggtttgaaacgctctttttgtagtatatggaagtggacgtttcggacggtttgaggcccatggtgataaagggaatatcttcccctacaagctagaaagaagcattctgtgaaacttctttgtgatgtgtgtagtcaagtaacagagttgaacctttctttttacagagcagttttgaaacactctttttgtagaatctgcgaggggatatttggatagatttcaggatttcgttggaaacgggaatattttcatataaaatctcgacagaagcattctcagaaacttctttatgatatctgcattcaagtcacagagttgaatattccctttcacagagtaggtttgaaacactctttttgtagtatctggaagtggacatttggagcgccttgacccctacggtgaaaagggaaatatcttcccataaaaactagacagaaggaatctcagaatcttctttgggatatatgcacgcagctaacagagttgaacctttctattgacagagcagtttagaaacagtctttctttggaatctgcaagtggatatttggatagcttggaggatttcgttggaaacgggattacgtataaaaagtagacagcagcatcctcagaaacttctttgtgatgtgtgcattcaagtcacagagttgaacattccctttcgtacagcagttttgaaactctctttctgtagtatctggaagtgaacattaggacagctttcagctctatggtgagaaaggaaatatcttcaaataaaaactagacagaagcattctcatcaacttctttgtgatgtgtgaactcagctaacagaggtggatctttcttttgatagagcagttctgaaaaacactttttgttgaatctgcaagtggacatttgtatagatttgaagatttcgttggaaacgggaatatcttcatatcaaatctagacagaagcattctcagaaacgtctttgtcatgtttgcattcaactcatagagttgaacattccctttcagagagcagctttgaaacactctttttgtagtatgtgcaagtggatatttggagcgctctgaggcctaaggtgaaaaagcaaatatcttcccataaccactagacagaaacattctcagaaactcctttatgacgtatgcactcacctaacagaaaagaaacttccttttgacagagcagttttgatacactctttttgtagaatctgcaagtggatatttggatagctgtgaagatttcgttggaaacgggaatatcttcctataaaatctagacagaagcattctcagaaactgctctgtgatgtctgcattcaagtcagagagttgaacattgcctttcacagaggaggtatgaaacgctcttttcgtaatatatggaagtggacgtttcggacggcttgaggcccatggagataaaggaaatatcttcccctacaagctagaaagaagcattctgtgaaacttgtttgtgttgtgtgtactcaactaacagagttgaacctttctttttacggagcagttttgaaacactctttttgtagaatctacgaggggatatttggatagatttcaggatttcgttggaaacgggaatatcttcatataaaatctcgacagaagcattctcagaaacttcattgtgatatctgcattcaagtcacagagttgaatattccctttcagagagtaggtttgaaacactctttttgtagtatctggaagtggacatttggagcgccttgacacctacggtgaaaagggaaatatcttcccataaaaactagacagaagcaatctcagaatcttctttgggatatatgcacgcagctaacagagttgaaactttctattgacagagcagttttgaaacagtctttctgtggaatctgcaagtggatatttggatagcttggaggatttcgttggaaacgggattacgtataaaaagtagacagcagcatcctcagaaacttccttgtgatgtgtgcattcaagtcacagagttgaacattccctttcgtacagcagttttgaaacactctttctgtagtatctggaagtgaactttaggagagctttcaggtctatagtgagaaaggatatatcttcaaataaaaactagacagaagcattctcataaacttgtttgtgatgtgtgaactcagctaacagaggtggatctttcttttgatagagcagttctgaaaaacactttttgttgaatctgcaggtggacatttggatagatttgaagatttcgttggaaacgggaatatcttcatatcaaatctagacagaagcattctcagaaacatctttgtgatgtttgcattcaactcatagagttgaacattccctttcagagagcagctttgaagcactctttttgtagtatgtgcaagtggatatttggagcgctctgaggcctacggtgaaaaagcaaatatcttcccataaccactagacagaaacattctcagaaactcctttatgacgtatgtactcaactaacagagaagaaccttccttttgacagagcagttttgatacactctttttgtagaatctgcaagtggatatttggatagctgtgtagatttcgttggaaatgggaatatcttcctataaaatctagacagaagcattctcagaaactgctgtgtgatgtctgcattcaagacacagagttgaacattgcctttcatagagcaggtttgaaacgctctttttgtagtatatggaagtggacgtttcggacggtttgaggcccatggtgatacagcgaatatcttcccctaccagctagaaagaagcattctgtgaaacttgtttgtgatgtgtgtactcaactaacagagttgaacctttctttttacagagcagttttgaaacagtctttttgtagaatctgcgaggggatattttgatagatttcaggatttcgttggaaacgggaatatcttcatataaaatctcgacagaagcattctcagaaacttccttgtgatatgtgcattcaagtcacagagttgaatattccctttcacagaggaggtttgaaacactctttttgtagtatctggaagtggacatttggagcgccttgacgcctacggtgaaaagggaaatatcttcccataaaaactagacagaagcaatctcagaatcttctttgggatatatgcatgcagctaacagagttgaacctttctattgacagagcagttttgaaacagtctttctgtggaatctgcaagtggatatttggatagcttggaggatttcgttggaaacgggattaccgtataaaaagtagacagcagcatcctcagaaacttctttgtgatgtgtgcattcaagtcacagagttgaacattccctttcgtacagcagttttgaaacactctttctgtagtatctggaagtgaacattaggacagctttcaggtctatggtgagaaaggaaatatcttcaaaaaaaactggacagaaacattctcataaacttgtttgtgatgtgtgaactcagctaacagaggtggatctttcttttgatagagcagttctgaaaaacactttttgttgaatctgcaagtggacatttggatagatttgaagatttcgttggaaatgggaatatcttcatatcaaatctagacagaagcattctcagaaacgtctttgtgatgtttgcattcaactcatagagttgaacattccgtttcagagaccagctttgaagcactctttttgtagtatgtgcaagtggatatttggagcgctctgaggcctacggtgaaaaagcaaatatcttcccataacctctagacagaaacattctcagaaactcctttatgacgtatgcactcacctaacagaaaagaaccttccttttgacagagcagttttgatacactctttttgtagaatctgcaagtggatatttggatagctgtgaagatttcgttggaaacgggaatatcttcctataaaatctagacagaagcattctcagaaactgctctgtgatgtctgcattcaagtcacagagttgaacattgcctttcatagagcaggtttgaaatgctctttttgtagtatatggaagtggacttttcggacggtttgaggcccatggtgacaaagggaatatcttcccctacaagctagaaagaagcattctgtgaaacttgtttgtgatgtgtgcactcaactaacagagttgaacctttctttttacagagcagttttgaaacactctttttgtagaatctgcgaggggatatttggatagatttcaggatttcgttggaaacgggaatatcttcatagaaaatctcgacagaagcattctcagaaacttctttgtgatatgtgcattcaagtcacagagttgaatattccctttcacagagtaggtttgaaacactctttttgtaatatctggaagtggacatttggagcgccttgacgcctacggtgaaaagggaaatatcttcccataaaaactagacagaagcaatctcagaaacttctttgggatatatgcacgcagctaacagagttgaacctttctattgactgagcagatttgaaacagtctttctgtggaatctgcaagtggatatttggatagattggaggatttcgttggaaacgggattacgtataaaaagtagacagcagcatcctcagaaacttctttgtgatgtgtgcattcaagtcacagagttgaacattccctttcgtacagcagttttgaaacgctctttctgtagtatctggaagtgaacataaggacagctttcaggtctatggtgagaaaggaaatatcttcaaataaaaactagacagaagcattctcataaacttgtttgtgatgtgtgaactcagctaacagaggtggatctttcttttgatagagcagttcagaaaaacactttttgttgaatctgcaagtggacatttggatagatttgaagatttcgttggaaacgggaatatcttcatatcaaatctagacagaagcattctcagaaacgtctttgtgatgtttgcattcaactcatagagttgaacattccgtttcagagagcagctttgaagcactctttttgtagtatgtgcaagtggatatttggagcgctctgaggcctaaggtgaaaaagcaaatatcttcccgtaaccactagacagaaaaattctcagaaactcctttatgacgtatgcactcacctaacagagaagaaccttccttttcacagagcagttttgatacactctttttgtagaatctgcaagtggatatttggatagctgtgaagatttcgttggaaacgagaatatcttcctataaaatctagacagaagtattctcagaaactgctctgtgatgtctgcattcaagtcacagagttgaacattgcctttcatagaggaggtttcaaacactctttttttagtatatggaagtggacgtttcggacggtttgaggcccatggtgataaaggaaatatcttcccctacaagctagaaagaagcattctgtgaaacttgtttgtgatgtgtgtactcaagtaacagagttgaacctttctttttacagagcagttttgaaacactctttctgtagaatctgcgaggggatatttggatagatttcaggatttctttggaaacgggaatatcttcatataaaatctcgacagaaacattctcagaaacttctttgtgatatgtgcattcaagtcacagagttgaatattccctttcacagagtaggtttgaaacactctttttgtagtatctggaagtggacatttggagcgccttgacgcctacggtgaaaagggaaatatcttcccataaaaactagacagaagcaatctcagaatcttctttgggatatatgcacgcagctaacagagctgaacctttctattgacagaacagttttgaaagagtctttctgtggaatctgcaagtggatatttggatagcttggaggatttcgttggaaacgggattacgtataataagtagacagcagcatcctcagaaacttctttgtgatgtgtgcattcaagtcacagagttgaacattccctttcgtacagcagttttgaaacactctttctgtagtatctggaagtgaacattagtacagctttcaggactatggtgagaaaggaaatatcttcaaataaaaacttgagagaagcattctaataaacttgtttgtgatgtgtgaactcagctaacagaggtggatctttcttttgatagagcagttctgaaaaacactttttgttgaatctgcaagtggacatttggatagatttgaagatttcgttggaaacgggaatatcttcatatcaaatctagacagaagcattctcagaaacgtctttgtgatgtttgcattcaacccatagagttgaacattctgtttcagagagcagctttgaagcgctctttttgtagtatgtgcaagtggatattttgagcgctctgaggcctaaggtgaaaaagcaaatatcttcccataaccactagacagaaacattctcagaaacttctttatgacgtatgtactcaactagcagagaagaaccttccttttgagagagcagttttgatacactctttttgtagaatctgcaagtggatatttggatagctgtgaagatttcgttggaaacgggaatatcttcctataaaatctagacagaagcattctcagaaactgctctgtgatgtctgcattcaagtcacagagttgaacattgcctttcatagagcaggtttgaaacgctcttttcgtagtatatggaagtggacgtttcggacggtttgaggcccatggtgataaagcgaatatcttcccctaccagctagaaggaagcattctgtgaaacttgtttgtgatgtgtgtactcaactaacagagttgaacctttctttttacagagcagttttgaaacactctttttgtagaatctgcgaggggatatttggatagatttcaggatttcgtcggaaacgggaatatcttcatataaaatctcgacagaagcatcctcagaaactactttgtgatgtgtgcattcaagtcacagagttgaacattccctttcgtacagcagttttgaaacactctttttgtagtatctggaagtggacatttggagcgccttgacacctacggtgaaaagggaaatatcttcccataaaaactagacagaagcaatctcagaatcttttttgggatatatgcacgcagttaacagagttgaacctttctattgacagagcagttttgaaacagtctttctgtggaatctgcaagtggatatttggatagcttggaggatttcgttggaaacgggattacgtataaaaagtagacagcagcatcctcagaaacttctttgtgatgtgtacattcaagtcacagagttgaacattccctttcgtacagcagttttgaaacactctttctgtagtatctggaagtgaacattaggacagctttcaggtctatggtgagaaaggaaatatcttcaaataaaaactagacagaagcattctcataaacttgtttgtgatgtgtgaactaagctaacagaggtggatctttcttttgatagagcagttctgaaaaacactttttgttgaatctgcaagtggatatttggatagatttgaagatttcgttggaaacgggaatatcttcatatcaaatctagacagaagcattctcagaaacgtctttgtgatgtttgcattcaactcatagagttgaacattccctttcagagagcagctttgaagcactctttttgtagcatgtgcaagtggacatttggagcgcccagaggcctacggggaaaaagcaaatatcttcccataaccactagacagaagcattctcagaaactcctttatgacgtatgcactcacctaacagaaaagaaccttccttttgacagagcagttttgatacactcttttcgtagaatctgcaagtggatatttggatagctgtgaagatttcgttggaaacgggaatatcttcctataaaatctagacagaagcattctcagaaactgctctgtgatgtctgcattcaagtcacagagttgaacattgcctttcatagagcaggtttgaaacgctctttttgtagtatatggaagtggacttatcggacgatttgaggcccatggtgataaagggaatatcttcccctacaagctagaaagaagcattctgtgaaacttgtttgtgatgtgtgtactcaactaacagagttgaacctttcattttacagagcagttttgaaacactctttttgtagaatctgtgaggggatatttggatagatttcaggatttcgttggaaacgggaatatcttcatataaaatctcgacagaagcattctcagcaaacttctttgtgatatgtgcattcaagtcacagagttgaatattccctttcacagagcaggtttgaaacactctttttgtactatctggaagtggacatttggagcgccttgacgcctacggtgaaaagggaaatatcttcccataaaaactagacagaagcaatcacagaatcttctttgggatatatgcacgcagctaacagagttgaacctttctattgacagagcagttttgaaacagtctttctgtggaatctgcaagtggatatttggatagcttggaggatttcgttggaaacgggattacgtataaaaagtagacagcagcatcctcagaaacttctttgtgatgtgtgcattcaagtcacagagttgaacattccctttcgtacagcagttttgaaacactctttctgtagtatctggaagtgaacattaggtcagctttcatgtctatggtgagaaaggcaatatcttcaaataaaaactagacagaagcattctcataaacttgttcgtgatgtgtgaactcagctaacacacgtggatctttcttttgatagagcagtgctgaaaaacagtttttgttgaatctgcaagaggacatttggatggatttgaagatttcgttggaaacgggaatatcttcatatcaaatctagacagaagcattctcagaaacgtctttgcgatgtttgcattcaactcatagagttgaacattccgtttcagagagcagctttgaggcactctttttgtagtatgtgcaagtggatatttggagcgctctgaggcctacggtggaaaaagcaaatatcttcccataaccactagacagaaacattctcagaaactcctttatgacgtatgcactcacctaacagagaagaaccttccttttgacagagcagttttgatacaatctttttgtagaatctgcaagtggatatttggatagctgtgaagatttcgttggaaacgggaatatcttcctataaaatctatacagaagcattctcagaaactgctctgtgatgtctgcattcaagtcacagagttgaacattgcgtttcatagagcaggtttgaaacgctctttttgtagtatatggaagtggacttttcggacggtttgaggcccatggtgataaagggaatatcttcccctacaagctagaaagaagcattctgtgaaacttgtttgtgatgtgtgtacacaactaacagagttgaacctttctttttacagagcagttttgaaacactctttttgtagaatctgcgaggggatatttggatagatttcaggatttcgttggaaacgggagtatcttcatataaaatctcgacagaagcattctcagaaacttctttgtgatatctgccttcaagtcacagagttgaatattccctttcacagagtaggtttgaaacactctttttgtagtatctgagagtggacatttggagcgccttgacgcctacggtgaaaagggaaatatcttcccataaaaactagacagaagcaatctcagaatcttctttgggatatatgcacgcagctaacagagttgaacctttctattgacagagcagttttgaaacagtctttctgtggaatctgcaagtggatatttggatagcttggaggatttcgttggaaacgggattacgtataacaagtagacagcagcgtcctcaggaacttctttgtgatgtgtgcattcaagtcacagagttgaacattcccttccatacagcagttttgaaacactctttctgtagtatctggaagtgaacattaggacagctttcaggtctatggtgagaaaggaaatatcttcaaataaaaactagacagaagcattctaataaacttgtttgtgatgtgtgaactcagctaacagaggtggatctttcttttgatagagcagttctgaaaaacactttttgttgaatctgcaagtggacatttggatagatttgaagatttcgttggaaacgggaatatcgtcatatcaaatctagacagaagcattctctgaaacgtctttgtgatgtttgcattcaactcatagagttgaacatttcgtttcagagagcagctttgaggcactctttttgtagtatgtgcaagtggatatttggagcgctctgaggcctacggtgaaaaagcaaatatcttcccataaccactagacagaaaacattctcagtaaactcctttatgacgtatgcactcacctaacagaaaagaaccttccttttgacagagcagttttgatacactctttttgtagaatctgcaagtggatatttggatagctgtgaagatttcgttggaaacgggaatatcttcctataaaatctagacagaagcattctcagaaactgctctgtgatgtctgcattcaagtcacagagttgaacattgcctttcatagagcaggtttgaaacgctctttttgtagtatatggaagtggacgtttcggacggtttgaggcccatggtgttaaagggaatatcttcccctacaaggtagaaagaagcattctgtgaaacttgtttgtgatgtttgtactcaactaacagagttgaacctttctttttgcagagcagttttgaaacactctttttgtagaatctgcgaggggatatttggatagatttcaggatttcgttggaaacgggaatatcttcatataaaatctcgacagaagcattctcagaaacttcattgtgatatctgcattcaagtcacagagttgaatattccctttcacagagtaggtttgaaacagtctttttgtagtatctggaagtggatatttggagcgccttgacacctacggtgaaaagggaaatatcttcccataaaaactagacagaagcaatctcagaatcttctttgggatatatgcacgcagctaacagagttgaacctttctattgacagagcagttttgaaacagtccttctgtggaatctgcaagtggatatttggatagcttggaggatttcgttggaaacgggattacgtataaaaagtagacagcagcatcctcagaaacttctttgtgatgtgtgcattcaagtcacagagttgaaccttccctttcgtacagcagttttgaaacactctttctgtagtatctggaagtgaacattaggacagctttcaggtctatggtgagaaaggaaatatcttcaaataaaaactagacagaagcattctcataaacttgtttgtgatgtgtgaactcagctagcagaggtggatctttcttttgatagagcagttcggaaaaacactttttgttgaatctccaagtggacatttggattgatttgaagatttcgttggaaacgggaatatctttatatcaaatctagacagaaacattgtcagaaactcctttatgacgtatgcactcacctaacagcagaagaaccttccttttgacagagcagttttgatacactctttttgtagaatctgcaagtggatatttggatagctgcgaagatttcgttggaaacgggaatatcttcctataaaatctagacagaagcattctcagaaactgctctgtgatgtctgcattcaagtcacagagttgaacattgcctttcatagagcaggtttgaaacgctctttttgtagtatatggaagtggacgtttcagacggtttgaggcccatggtgataaagggaatatcttcccctacaagctagaaagaagcattctgtgaaacttgtttgtgatgtgtgtactcaactaacagagttgaacctttctttttacagagcagttttgaaacactctttttgtagaatctgcgaggggatatttgggatagatttcaggatttcgttggaaaggggaatatcttcatataaaatctcgacagaagcattctcagaaacttctttgtgatatgtgcattcaagtcacagagttgaatattccctttcacagagtaggtttgaaacactgtttttgtagtatctggaagtggacatttggagcgccttgacgcctacggtgaaaagggaaatatcttcccataaaaactagacagaagcaatctcagaatcttctttgggatatatgcacgcagctaatagagttgaacttttctattgacagagcagatttgaaacagtctttctgtggaatctgcaagtggatatttggatagcctggaggattacgttggaaacgggattacgtataaaaagtaaacagcagcatcctcagaaacatccttgtgatgtgtgcattcaagtcacagagatgaacattccctttcttacagcagttttgaaacactctttctgtagtatctggaagtgaactttaggagagctttcaggtctatagtgagaaaggatatatcttcaaataaaaactagacagaagcattctgataaacttgtttgtgaagtgtgaactcagctaacagaggtggatctttcttttgatagagcagttctgaaaaacactttttgttgaatctgcaagtggacattttgatagatttgaagatttcgttggaaacgggaatatcttcatatcaaatctagacagaagcattctcggaaacgtctttgtgatgtttgcattcaactcacaaagttgaacattccgtttcagagagcagctttgaggcactctttttgtagtatgtgcaagtggatatttggagcgctctgaggccttctgtgaaaaagcaaatatcttcccataaccactagacagaaacattctcagaaactcctttatgacgtatgtactcaactagcagagaagaactttccttttgacagagcatttttgatacattctttttgtagtatctgcaagtggatatttggatagctgtgaagatttcgttggaaacgggaatatcttcctataaagtctggacagaagcattctcagaaactgctactgtgatgtctgcattcaagtcacagagttgaacattgcctttcatagagcaggtttcaaacactctttttttagtatatggaagtggacgtttcggatggtttgaggcccatggtgataaaggaaatatcttcccctacaagctagaaagaagcattgtgtgaaacttgtttgtgatatgtgtactcaactaacagagttgaacctttctttttacagagcagttttgaaacactctttttgtagaatctgcgaggggatatttggatagatttcaggatttcgttggaaacgggaatatcttcatataaaatctcgatagaagcatcctcagaaacttctttgtgttgtgtgcattcaagtcacagagttgaatattccctttcacagagttggtttgaaacactctttttgtagtatctggaagtggacatttggagcgccttgacacctacggtgaaaagggaaatatcttcccataaaaactagacagaagcaatctcagaatcttctttgggatatatgtacgcagctaatagagttgaacctttctattgacagagcagttttgaaacagtctttctgtggaatctgcaagtggatatttggatagcttggaggatttcgttggaaacgggaatacgtataaaaagtagacagcagcatcctcagaaaacttctttctgatgtgtgcattcaagtcacagagttgaacattccctttcgtacagcagttttgaaacactctttctgtagtatctggaagtgaacattaggacagctttcaggtctatggtgagaaaggaaatatcttcaaataaaaactagacagaagcattctgataaacttgtttgtgaagtgtgaactcagctaacagaggtggatctttcttttgatagagcagttctgataaacactttttgttgaatctgcaagtggacatttggatagatttgaagatttcgttggaaacgggaatatcttcatatcaaatctagacagataagcattctcggaaacgtctttgtcatgtttgcattcaactcatagagttgaacattccgtttcagagagcagctttgaagcactctttttgtagtatgtgcaaggggatatttggagtgctctgaggcctaaggtgaaaaagcaaatatcttcccataaccactagacagaaacattctcagaaactcctttatgacgtatgcactcacctaacagagaagaaccttccttttgacagagcagttttgatacactctttttgtagaatctgcaagtggatatttggatacctgtgaagatttcgatggaaacgggaataacttcctataaaatctagacagaagcattctcagaaactgctctgtgatgtctgcattcaagtcacagagttgaacattgcctttcctagagcaggtttgaaacgctctttttgtagtatatgtaagtggacgtttcggacggtttgaggcccatggtgataaagggaatatcttcccctacaagctagaaagaaagcattctgtgaaacttgtttgtgatgtgtgtactcaactaacagagttgaacctttctttttacagagcagttttgaaacactctttttgtagaatctgcgaggggatatttggatagatttcaggatttcgttggaaaggggaatatcttcatataaaatctcgacagaagcattctcagaaacttctttgtgatatctgcattcaagtcacagtgttcaatattccctttcacagagtaggtttgaaacactctttttgtagtatctggaagtggacatttggaccgccttgacacctacggtgaaaagggaaatatcttcccataaaaactagacagaagcaatctcagaatcttctttgggatatatgcacgcagctaacagagttgaacctttctattgacagagcagttttgaaacagtctttctgtggaatctgcaagtggatatttggatagcttggaggatttctttggaaacgggattaagtataaaaagtagacagcagcatcctcagaaacttctttgtgatgtgtgcattcaagtcacagagttgaacattccctttcatacagcagttttgaaacactctttctgtagtgtctggaagtgaacattaggagagctttcaggtctatggtgagaaaggaaatatcttcaaataaaaactagacagaagcattctcataaacttgtttgtgatgtctgaactcagctaacagaggtggatcattcttttgatagagcagttctgaaaaacactttttgttgaatctgcaagtggacatttggatagatttgaagatttcgttggaaacgggaatatcttcatatcaaatctagacagaagcattctcagaaacgtctttgtgatgtttgcattcaactcatagagttgaacattccgtttcagagagcagctttgaggcactctttttctagtatgtgcaagtggatatttggagcgctctgaggcctacggtgaaaaagcaaatatcttcccataaccactagacagaaacattctcagaaactcctttatgacgtatgcactcacctaacagaaaagaaccttccttttgacagagcagttttgatacactctttttgttgaatctgcaagtggatatttggatagctgtgaagatttcgttggaaacgggaatatcttcctataaaatctagacagaagcattctcagaaactgctctgtgatgtctgcattcaagtcacagagttgaacattgcctttcatagagcaggtttgaaacgctctttttgtagtatatggaagtggacttatcggacggtttgaggcccatggtgataaagggaatatctttccctacaagctagaaagaagcattctgtgaaacttgtttgtgatgtgtgtactcaactaacagagttgaacctttctttttacagagcagttttgaaacactctttttgtagaatctgtgaggggatatttggatagatttcaggatttcgttggaaacgggaatatcttaatataaaatctcgacagaagcattctcagaaacttctttgtgatatgtgcattcaagtcacagagttgaatattccctttcacagagtaggtttgaaacactctttttgtagtatctggaagtggacatttggagcgccttgacgcctaccgtgaaaagggaaatatcttcccataaaaactagacagaagcaacctcagaatcttctttgggatatatgcacgcagctaacagagttgaacctttctattgacagagcagttttgaaagagtctttctgtggaatctgcaagtggatatttggatagcttggaggatttcgttggaaacgggattacgtataataagtagacagcagcatcctcagaacctccttttgatgtgtgcattcaagtcacagagttgaacattcccttttgtacagcagtattgaaacactctttctgtagtatctggaagtgaacattaggacagctttcaggtctatggtgagaaaggaaatatcttcaaataaaaactagacagaagcattctcataaacttgtttgtgatgtgtgaactcagctaacagaggtggatcgttcttttgatagagcagttctgaaaaacacattttgttgaatctgcaagtggacatttggatagatttgaagatttcgttggaaacgggaatatcttcatatcaaatctagacagaagcattcttggaaacgtctttgtgatgtttgcattcaactcatagagttgaacattccgtttcagagagcagctttgaagcactctttttgtagtatgtgcaagtggatatttggagcgctctgaggcctacggtgaaaaagcaaatatcttcccataaccactagacagaaacattctcagaaactcctttatgacgtatgcactcacctaacagagaagaaccttccttttgacagagcagttttgatacactctttttgtagaatctgcaagtggatattcgatagctgtgaagttttcgttggaaacgggaatatcttcctataaaatctagacagaagcattctcagaaactgctctgtgatgtctgcattcaagtcacagagttgaacattgcctttcatagagcaggtttgaaacgctctttttgtagtatatggaagtggacgtttcggacggtttgaggcccatggtgataaagggaatatcttcacctacaagctagaaagaagcattgtgtgaaacttatttgtgatgtgtgtactcaactaacagagttgaacctttctttttacagagcagttttgaaacactctttttgtagaatctgcgaggggatatttggatacatttcagcatttcgttggaaacgggaatatcttcatataaaatctcgacagaagcattctcagaaacttctttgtgatatctgcattcaagtcacagagttgaatattccctttcacagagtaggtttgaaacactctttttgtagtatctggaagtggacatttggagcaccttgacacctacggtgaaaagggaaatatcttccaataaaaactagacagaagcaatctcagaatcttctttgggatatatgcacgcagctaacagagttgaacctttctattgacagagcagttttgaaacagtctttctgtggaatctgcaagtggatatttggatagcttggaggatttcgtttgaaacgggattacgtataaaaagtagacagcagcctcctctgaaacttctttgtgatgtgtgcattcaagtcacagagttgaacattccctttcgtacagcagttttgaaacactctttctgtagtatctggaagtgaacattaggacagctttcaggtctatggtgagaaaggcaatatcttcaaataaaaactagacagaagcattctcataaacttgtttgtgatgtgtgaactcagctaacagaggtggatctttcttttgatagagcagttctgaaaaacactttttgttgaatctgcaagtggacatttgtatagatttgaagatttcgttggaaacgggaatatcttcatatcaaatctagacagaagcattctcagaaacgtctttgtgatgtttgcattcaactcatagagttgaacattccgtttcagagagcagcattgaagcactctttttgtagtatgtgcaagtggatatttggagcgctctgaggcctacggtgagaaagcaaatatctccccataaccactagacagaaacattctcagaaacttctttatgacgtatgtactcaactagcagagaagaactttccttttgacagagaacttttgatacactctttttgtagtatctgcaagtggatatttggatagctgtgaagatttcgttggaatcgggaatatcttcctataaagtctggacagaagcattctcagaaactgctctgtgatgtctgcattcaagtcacagagttgaacattgcctttcatagagcaggtttgaaatgctctttttgtagtatatggaagtggacttttcggacggttggaggcccatggtgataaagggaatatcttcccctacaagctagaaagaagcattctgtgaaacttgtttgtgatgtgtgtactcaactaacagagttgaacctttctttttacagagcagttttgaaacactctttttgtagaatctgcgaggggaaatttggatagatttcaggatttcattggaaacgggaatatcttcatacaaaatctcgacagaagcattctcagaaacttctttgtgatatctgcattcaagtcacagagttgaatattccctttcacagagtaggtttgaaacactctttttgtagcatctggaagtggacatttggagcgcattgacgcctacggtgaaaagggaaatatcttcccataaaaactagacagaagcaatctcagaatcttctttgggatatatgcacgcagctaacagagttgtacctttctattgacagagcagttttgaaacagtctttctgtggaatctgcaagtggatatttggatagcttggaggatttcgttggaaacgggattacgcataaaaagtagacagcagcatcctcagaaacttctttgtgatgtgtgcattcaagtcacagagttcaacattccctttcgtacagcagttttgaaacactctttctgtagtaactggaagtgaacattaggacagctttcaggtctatggtgagaaaggaaatatcttctaataaaaactagacagaagcattctcataaacttgtttgtgatgtctgaactcagctaacagaggtggatctttcttttgatagagcagttctgaaaaacactttttgttgaatctgcaagtggacatttggatagatttgaagatttcgttgtaaacgggaatatcttcatatcaaatctagacagaagcattctcagaaacgtctttgcgatgtttgcattcaactcatagagttgaacattccctttcagagaccagctttgaagcactctttttgtagtatgtgcaagtggatatttggagcgctctgaggcctacggtgaaaaagcaaatatcttcccataaccactacacagaaacattctcagaaactcctttatgacgtatgcactcacctaacacagtaagaaccttccttttgacagagcatttttgatacactctttttgtagcatctgcaagtggatatttggatatctgtgaagatttcgttggaaacgggaatatcttcctataaaatctagacagaagcattctcagaaactgctctgtgatgtctgcattcaactcacagagttgaacattgcctttcatagagcaggtttgaaacgctctttttgtagtatatggaagtggatgtttcggacggttggaggcccatggtgataaagggaatatcttcccctacaagctagaaagaagcattctgtgaaacttgtttgtgatgtgtgtactcaactaacagagttgaacctttctttttacagagcagttttgaaacactctttttgtagaatctgcgaggggatatttggatagatttcaggatttcgttggaaacgggaatatcttcatataaaatctggacagaagcattctcagaaacttctttgtgatatctgcattcaagtcacagagttgaatattccctttcacagagtaggtttgaaacactctttttgtagtatctggaagtggacatttggagcgccttgacgcctacggtgaaaagggaaatatcctctcataaaaagtagacagaaagcaatctcagaatcttctttgggatatatgtacgcagctaatagagttgaacctttctattgacagagcagttttgaaacagtctttctgtggaatctgcaagtggatatttggatagcttggaggatttcgttggaaacgggattacgtataaaaagtagacagcagcatcctcagaaacttctttgtgatgtgtgcattcaagtcacagagttgaacattccctttcgtacagcagttttgaatcactctttctgtagtatctggaagtgaacattaggacagctttcaggtctatggtgagaaaggaaatatcttcaaataaaaactagacagaagcattctcataaacttgtttgtgatgtgtgaactcatctaacagaggtggatctttcttttgatagagcagttctgaaaaacactttttgttgaatctgcaagtggacatttggaaagatttgaagatttcgttggaaacgggaatatcttcatatcaaatctagacagaagcattctcagaaacgtctttgtgatgttagcattcaactcatagagttgaacattccctttcagagagcagctttgaagcactctttttgtagtatgtgcaagtggacatttggagcgctttgaggcctacggggaaaaagcaaatatcttcccataaccactagacagaaacattctcagaaacttctttatgacgtatgtactcaagtagcagagaagaactttccttttgacagagcactttggatacacactttttatagtatctgcaagtggatatttggatagctgtgaagatttcgttggaaacgggaatatcttcctataaagtctggacagaagcattctcagaaactgctctgtgatgtctgcattcaagtcacagagttgaacattgcctttcatagagcaggtttgaaacgcttttttgtagtatatggaagtggacgtttcgaacggtttgaggcccatggtgataaagggaatatcttcccctacaagctagaaagaagcattctgtgaaacttgtttgtgatgtgtgtactcaactaacagagttgaacctttcgttttacagagcagttttgaaccactctttttgtagaatctgcgagtggatatttggatagatttcaggatttcgttggaaacgggaatatcttcatataaaatctcgacagaagcattctcagaaacttctttgtgatatgtgcattcaagtcacagagttgaatattccctttcacagagtagatttgaaacactctttttgtagtatctggaagtggacatttggagcgccttgacgcctacggtgaaaagggaaatatcttcccataaaaactagacagaagcaatctcagaatcttctttgggatatatgcacgcagctaacagagttgaacctttctattgacagagcagttttgaaacagtctttctgtggaatctgcaagtggatatttggatatcttggaggatttcgttggaaacgggattacgtataaaaagtagacagcagcatcctcagaaacttctttgtgatgtgtgcattcaagtcacagagttgaacattccctttcgtacagcagttttgaaacactctttctgtagcatatggaagtgaacattagaacagctttcaggtctatggtgagaaaggaaatatcttcaaataaaaactagacagaagcattctgtgaaacttgtttgagatgtgtgtactcaactaacagtgttgaacctttctttttacagagcagttttgaaacactcttttggtagaatctgcgaggggatatttggatagatttcaggatttcgttggaaacgggaatatcttcatataaaatctcgacagaagcattctcagaaacgtctttgtgatgttagcattcaactcatagagttgaacattccctttcagagagcagctttgaagcactctttttgtagtatgtgcaagtggatatttggagcgctctgaggcctaaggtgaaaaagcaaatatcttcccgtaaccactagacagaaacattctcagaaactcctttatgacgtatgcactcacctaacagagaagaacttaccttttgacagagcagttttgatacactctttttgtagaatcttcaagtggatatttggatagctgtgaagatttcgttggaaacgggaatatcttcctataaaatctagacagaagcattctcagaaactgctctgtgatgtctgcattcaagtcacagagttgaacattgcctttcctagaacaggtttgaaacgctctttttgtagtatatggaagtggacgtttcggacggtttgaggcccatggtgataaagggaatatcttgccctacaagctagaaagaagcattctgtgaaacttgtttgtgatgtgtgtactcaactaacagagttgaacctttctttttacagagcagttttgaaccactctttttgtagaatctgcgagggaatatttggatagaattcaggatttcgttggaaacgggaatatcttcatataaaatctcgacagaagcattctcaaaaacttctttgtgatatgtgcattcaagtcacagagttgaatattccctttcacagagtaggtttgaaacactctttttgtagtatctggaagtggacatttggagcgccttgacacctacggtgaaaagggaaatatcttcccataaaaactagacagaaagcaatctcagaattttctttgggatatatgcacacagctaacagagttgaacttttctattgacatagcagttttgaaacagtctttctgtggaatctgcaagtggatatttggatagcttggaggatttcgttggaaacgggattacgtataaaaagtagacagcagcatcctcagaaacttatttgtgatgtgtgcattcaagtcacagagttgaacattccatttcatacagcagttttgaaacactctttctgtagtatctggaagtgaacattaggacagctttcaggtctatggtgagaaaggaaatatcttcaaataaaaactagacagaagcattctcataaacttgtttgtgatgtgtgaactcagctaaaagaggtggatctttcttttgatagagcagttctgaaaaacactttttgttgaatctgcaagtggacatttggatagatttgaagatttcgttggaaacgggaatatcttcatatcaaatctagacagaagcattctcagaaacgtctttgtgatgtttgcattcaacccatagagttgaacattccctttcagagagcagctttgaagcactctttttgtagtatgtgcaaggggatatttggagcgctctgaggcctaaggtgaagaagcaaatatcttcccataaccactagacagaaacattctcagaaactcctttatgacgtatgcactcacctaacagagaagaaccttccttttgacagagcagttttgatacactctttttgtagaatctgcaagtggatatttggatagcagtgaagatttcgttggaaacgggaatatcttcctataaaatctagacagaagcattctaagaaactgctctgtgatgtctgcattcaagtcacagagttgaacattgcctttcatagagcaggtttgaaatgctctttttgtagtatatggaagtggacgtttcagacggtttgaggcccatggtgataaagggaatatcttcccctacaagctagaaagaagcattctgtgaaacttgtttgtgatgtgtgtacttaactaacagagttgaacctttcttttcacagagcagttttgaaacactctttttgtagaatctgcgagcggatatttggatagatttcaggatttcgttggaaacgggaatatcttcatataaaatctcgacagaagcattctcagaaacttctttgtgatatctgccttcaagtcacagagttgaatattccctttcacagagtaggtttgaaacactctttttgtagtatctggaagtggacatttgcagcgccttgacgcctacggtgaaaagggaaatatcttcccataaaaactagacagaagcaatctcagaatcttcttagggatatatgcacgcagctaacagagttgaacctttctattgacagagcagttttgaaacagtctttctgtggaatctgcaagtggatatttggatagcttggaggatttcgttggaaacgggattacgtataaaaagtagacagccagcatcctcagaaacttctttgtgatgtgtgcattcaagtcacagtgttgaacattccctttcgtacagcagttttgaaacactctttctgtagtatctggaagtgaacattaggacagctttcaggtctatggtgagaaaggaaatatcttcaaataaaaactagacagagcgttctcataaacttgtttgtgatgtgtgaactcagctaacagaggtggatctttcttttgatagagcagttctgaaaaacactttttgttgaatctgcaagtggacatttggatagatttgaagatttcgttggaaacgggaatatcttcatatcaaatctagacagaagcattctcagaaacgtctttgtgatgtttgcattcaactcatagagttgaacattccgtttcagagagcagctttgaggcactctttttgtagtatgtgcaagtggatatttggagcgctctgaggccttcggtgaaaaagcaaatatcttcccataaccactagacagaatcattctcagaaactcctttatgacgtatgcactcacctaacagagaagaaccttccttttgacagagcagttttgatacactctttttgtagaatctgcaagtggatatttggatagctgtgaagatttcgttggaaacgggaatatcttcctataaaatctagacagaagcattctcagaaactcctctgtgatgtctgcattcaagtcacagagttgaacattgcctttcatagagtaggtttgaaacgctctttttgtagtatatggaagtggacgtttcggacggtttgaggcccatggtgataaagggaatatcttcccctacaagctagaaagaagcattctgtgaaacttgtttgtgatgtgtgtactcaactaacagagttgaacctttctttttacagagcagttttgaaacactctttttgtagaatctgtgaggggatatttggatagatttcaggatttcgttgggaacgggaatatcttcatataaaatctcgacagaagcattctcagaagcttctttgtgatatgtgcattcaagtcacagacttgaatattccctttcacagagtaggtttgaaacactctttttgtagtatctggaagtggacatttggagcaccttgacgcctacggtgaaaagggaaatatcttctcataaaaagtagacagaagcaatctcagaatcttctttgggatatatgcacgcagctaacagagttgaacctttctattgacagagcagttttgaaacagtctttctgtggaatctgcaagtggatattcggatagcttggaggatttcgttggaaacgggattaagtataaaaagtagacagcagcatcctcagaaacttctttgtgatgtgtgcattcaagtcacagagttgaacattccctttcgtacagcagttttgaaacactctttctgtagtatctggaggtgaacattaggacagctttcagctctatggtgagaaaggaaatatcttcaaataaaaactagacagaagcattctcataaacttgtttgtgatgtgtgaactcagctaacacacgtggatctttcttttgatagagcagttctgaaaaacactttttgttgaatctgcaagtggacatttggatagatttgaagatttcgttggaaacgggaatatcttcatatcaaatctagacaaaagcattctcagaaacgtctttgcgatgtttgcattcaactcatagagttgaacattccgtttcagagagcagctttgaagcactctttttgtagtatgtgcaagtggatatttggagtgctctgaggcctacggtgaaaaagcaaatatcttcccataaccactagacagaaacattctcagaaactcctttctgacgtatgcactcagccaacagagaagaaccttccttttgacagagcagtgttgatacactctttttgtagaatctgcaagtggatatttggatagctgtgaagatttcgttggaaacgggaatatcttcctataaaatctagacagaagcattctcagaaactgctctgtgatgtctgcattcaagtcacagagttgaacattgcctttcctacagcaggtttgaaacgctctttttgtagtatatggaagtggacgtttcggacggtttgaggcccatggtgataaagggattatcttcccctacaagctagaaagaagcattctgtgaaacttgtttgtgatgtgtgtactcaaataacagagttgaacctttctttttacagagcagttttgaaacactctttttgtagaatctgcgaggggatatttggatagatttcaggatttcgttggaaacgggaatatcttcatataaaatctcgacagaagcattctcagaagcttctttgtgatatgtgcattcaagtcacagagttgaatattccctttcacagagtaggtttgaaacactctttttgtagtaactggaagtggacattttgagcaccttgacgcctacggtgaaaagggaaatatcttctcataaaaagtagacagaagcaatctcagaatcttctttgggatatatgcacgcagctgacagagttgaacctttctattgacagagcagttttgaaacagtctttctgtggaatctgcaagtggatgtttggatagattggaggatttcgttggaaacgggattaggtataaaaagtagacagcagcatcctcagaaacttccttgtgatgtgtgcattcaagtcacagagatgaacattccctttcgtacagcagttttgaaacactctttctgtagtatctggaagtgaacattaggagagctttcatgtctatagtgagaaaggatatatcttcaaataaaaactagacagaagcattctcataaacttgtttgtgatgtgtgaactcagctaacagaggtggatctttcttttgatagagcagttctgaaaaacactttttgttgaatctccaagtggacatttggatagatttgaagatttcgttggaaacgggaatatcttcatatcaaatctagacagaagcattctcagaaacgtctttgtgatgtttccattcaactcatagagttgaacattcactttcagagagcagctttgaagcactctttttgtagtatgtgcaagtggatattttgatcgctctgtggcctacggtgaaaaagcaaatatcttcccataaccactagacagaaacattctcagaaactcctttatgacgtatgcactcacctaacagagaagaaccttccttttgacagagcaggtttgatacactctttttgtagaatctgcaagtggatatttggatagctgtgaagatttcgttggaaacgggaatatcttcctataaaatcctagacagaagcattctcagtaaactgctctgtgatgtctgcattcaagtcacagagttgaacattgcctttcatagagcaggtttgaaatgctctttttgtagtatatggaagtggatgtttcggacggttggaggcccatggtgataaagggaatatcttcccctacaagctagaaagaagcattctgtgaaacttgtttgtgatgtgtgtactcaactaacagagttgaacctttctttttacagagcagttttgaaacactctttttgtagaatctgcgaggggatatttggatagatttcaggatttcgttggaaactggaatatcttcatataaaatgctcgacagaagcattctcagaaacttctttgtgatacctgcattcaagtcacagagttgaatattccctttcacagagtaggtttgaaacactcttcttgtagtatctggaagtggacatttggagcaccttgacgcctatggtgaaaagggaaatatcttcccataaaaactagacagaaggaatctcagaatcttctttgggatatatgcacgcagctaacagagttgaacctttctattgacagagcagttttgaaacagtctttctgtggaatctgcaagtgcatatttggatagcttggaggatttcgttgtaaacgggattacgtataaaaattagacagcagcatcctcagaaacttctttgtgatgtgtgcattcaactcacagagttgaacattccctttcgtacagcagttttgaaacactctgtagtatctggaagtgaacattaggacagctttcagctctatggtgagaaacgaaatatcttcaaataaaaactagacagaagcattctgataaacttgtttgtgaagtgtgatctcagctaacagaggtggatctttcttttgatagagcagttctgaaaaacactttgttgaatctgcaagtggacatttggatagatttgaagattttgttggaaacgggaatatcttcatatcaaatctagacagaagcattctcagaaacgtctttgcgatgtttgcattcaactcatagagttgaacattccgtttcagagagcagctttgaggcgctctttttgtagtatgtgcaagtggatatttggagcgctctgaggccttcggtgaaaaagcaaatatcttcccataaccactagacggaaacattctcagaaacttctttatgacgtatgtactcaactaacagagaagaaccttccttttgacagagcagttttgatacactcttcttggagaatctgcaagtagatatttggatatctgtgaagaattcgttggaaaagggaatatctttctataaaatctaaacaaaagcattctcagaaactgctctgtgatgtctgcattcaagtcacagagttgaacattgcctttcatagagcaggtttgaaacgctctttttgtactatatggaagtggatgtttcggacggtttgaggcccatggtgataaagggaatatcttcccctacaagctagaaagaagcattctgtgaaacttgtttgtgatgtgtgtactcaactaacagagttgaacctttctttttacagagcagttttgaaacactctttttgtagaatctgcgaggggatatttggatagatttcaggatttcgttggaaacgggaatatcttcctataaaatctcgacagaagcattctcagaagcttctttgtgatatgtgcattcaagtcacagagttgaatattccctttcacagagtaggtttgaaacattctttttgtagtatctggaagtggacatttggagcaccttgacacctacggtgaaaagggaaatatcttctcataaaaagtagacagaagcaatctcagaattttctttgggatatacgcacacagctaacagagttgaacttttctattgacatagcagttttgaaacagtctttctgtggaatctgcaagtggatattttgatagcttggaggatttcgttggaaacgggattacgtataaaaattagacagcagcatcctcagaaacttctttgtgatgtgtgcattcaagtcacagagttgaaaattccctttcgtacagcagttttgaaacactctttctgtagtatgtggaagtgaacattaggacagctttcaggtctatggtgagaaaggaaatatcttcaaataaaaactagacagaagcaatctcataaacttgtttgtgatgtgtgaactcagctaacagaggtggatctttcttttgatagagcagttctgaaaaacactttttgttgaatctgcaagtggacatttggatagatttgaagatttcgttggaaacgggaatatcttcatatcaaatctagacagaaggcattctcagaaacgtctttgtgatgtttgcattcaactcatagagttgaacattccgtttcagagagcagctttgaggcactctttttgtagtatgtgcaagtggatatttggagcgctctgaggcctacggtgaaaaagcaaatatcttcccataaccactagacagaaacattctcagaaactcctttatgacgtatgcactcacctaacagagaagaaccttccttttgacagagcagttttgatacactctttttgtagaatctgcaagtggatatttggatagctgtgaagatttcgttggaaacgggaatatcttcctataaaatctagacaggagcattgtcagaaactgctctgtgatgtctgcattcaagtcacagagttgaacattgcctttcatagagcaggtttgaaacgctctttttgtagtatatggaagtggatgtttcggacggttggaggcccatggtgataaagggaatatcttcccctacaagctagaaagaagcattctgtgaaagttgtttgtgatgtgtgtactcaactaacagagttgaacctttctttttacagagcagttttgaaacactctttttgtagaatctgcgaggggatatttggatagatttcaggatttcgttggaaacgggaatatcttcatataaaatctcgacagaagcattctcaggaaacttctttgtgatatctgcattcaagtcacagagttgaatattccctttcacagagtaggtttgaaacactctttttgtagtatctggaagtggacattttgagcgccttgacacctacggtaaaaagggaaatatcttcccataaaaactagacagaagcaatctcagaatcgtctttgggatatatgcacgcagctaacagagttgaacctttctatacacagagcagttttgaaacagtctttctgtggaatctgcaagtggatatttggatagcttggaggatttcgttggaaacgggattacgtataaaaagtagacagcagcatcctcagaaacatccttgtgatgtgtgcattcaagtcacagagttgaacattccctttcgtacagcagttttgaaacactctttctgtagtatctggaagtgaactttaggacagctttcaggtctatggtgagaaaggatatatcttcaaataaaaactagacggaagcattctcataaacttgattgtgatgtgtgaactcagctaacagaggtggatctttcttttgatagagcagttctgaaaaacactttttgttgaatctgcaagtggacatttggatagatttgaagatttcgttggaaacgggaatatcttcatatcaaatctagacagaagcattctcagaaacgtctttgtgatgtttgcattcaactcatagagttgaacattccgtttcagagaccagatttgaagcactctttttgtagtatgtgcaagtggatatttggagcgctctgaggcctacggtgaaaaagcaaatatcttcccataaccactagactagaaacattctgagaaactcctttatgacgtatgcactcacctaacagagaagaaccttccttttgacagagcatttttgatacactctttttgtagaatctgaaagtggatatttggatagctgtgaagatttcgttggaaatgggaatatcttcctataaaatctagacagaagcattctcagaaactgctctgtgatgtctgcattcaagtcacagagttgaacattgcctttcatagagcaggtttgaaacgctctttttgtagtatatggaagtggacttttcggacggttggaggcccatggtgataaaggaaatatcttcccctacaagctagaaagaagcattctgtgaaacttgtttgtgaggtgtgtactcaactaacagagttgaacttttctttttacagagcagttttgaaacactctttttgtagaatctgcgaggggatatttggatagatttcaggatttcgttggaaaggggaatatcttcatataaaatctcgacagaagcattctcagaaacttctttgtgatatgtgcattcaagtcacacagttgaatattccctttcacagagtaggtttgaaacactctttttgtagtatctggaagtggacatttggagcgccttgacgcccacggtgaaaagggaaatatcttcccataaaaactagacagaagcaatctcagaatcttctttgggatatatgtacgcagctaatagagttgaacctttctattgacagagcagttttgaaacagtctttctgtggaatctgcaagtggatatttggatagcttggaggattttgttggaaacgagattacgtataaaaagtagacagcagcatcctcagaaacttctttgtgatgtgtgcattcaagtcacagtgttgaacattcccttttgtacagcagttttgaaacactctttctgtagtatctggaagtgaacattaggacagctttcaggtctatggtgagaaaggaaatatcttcaaataaaaactagacagaagcattctcataaacttgttcgtgatgtgtgaactcagctaagagccgtggatctttcttttgatagagcagttctgaaaaacactttttgttgaatacgcaagtggacatttggatagatttgaagatttcgttggaaacgggaatatcttcatatcaaatctagacagaagcattctcagaaacgtctttgtgatgtttgcattcaactcatagagttgaacattccgtttcagagaccagctttgaggcactctttttgtagtatgtgcaagtggatatttggagcgctctgaggcctacggtgaaaaagcaaatatcttcccataaccactagacagaaacattctcagaaactcctttatgacgtatgtactcaactaacagagaagaaccttccttttgacagagcagttttgatgcactctttttgtagaatctgcaagtggatatttggatagctgtgaagatttcgttggaaacgggaatatcttcctataaaatctagagagaagcattctcagaaactgctctgtgatgtctgcattacaagtcacagagttgaacattgcctttcatagagcaggtttgaaacgctctttttgtagtatatggaagtaaacgtttcggacggtttgaggcccatggtgataaagggaatatcttcccctacaagctagaaagaagcattctgtgaaacttgtttgtgatgtgtgtactcaactaacagagttgaacctttctttttacagagcagttttgaaacactctttttgtagaatctgcgaggggatatttggagagatttcaggatttcgttggaaacgggaatatcttcatataaaatactcgacagaagcattctcagaaacttctttgtgatatctgcattcaagtcacagagttgaatgttccctttcacagagtaggtttgaaacactctttttgtagtatctggaagtggacatttggagcgccttgacacctacggtgaaaagggaaatatcttccgataaaaactagacagaagcaatctcagaatcttctttgggatatatgcacgcagctaacagagttgaacctttctattgacagagcagttttgaaacagtctttctgtgaaatctgcaagtggatatttggatagcttggaggatttcgttggaaacgggattaagtataaaaagtagacagcagcatcctcagaatcttctttgtgatgtgtgcattcaagtcacagagttgaacattccctttcgtacagcagttttgaaacactctttctgtagtacctggaagtgaacattaggacagctttcaggtctatggtgagaaaggaaatatcttcaaataaaaactagacagaagcattctcataaacttgtttgtgatgtctgaactcagctaacagaggtggatctttcttttgatagagcagttctgaaaaacactttttgttgaatctgcaagtggacatttggatagatttgaagatttcgttggaaacgggaatatcttcctatcaaatctagacagaagcattctcagaaacgtctttgtgatgtttgcattcaactcatagagttgaacattccctttcagagagcagctttgaagcactctttttgaagcatgtgcaagtggacatttggagcgccctgaggcctacggggaaaaagcaaatatcttcccataaccactagacagaaacattctcagaaactcctttatgacgtatgtactcaactaacagagaagaaccttccttttgacagagcagttttgatacactctttttgtagaatctgcaagtggatatttggatagctgtgaagatttcgttggaaactggaatatcttcctataaaatctagacagaagcattctcagaaactgctctgtgatgtctgcattcaagtcacagagttgaacattgtctttcatagagcagatttgaagcgctctttttgtagtatatggaagtggacgtttcggacggtttgaggcccatggtgataaagggaatatcttcccctacaagctagaaagaagcattctgtgaaacttgtttgtgatgtgtgtactcaactaacggagttgaacctttctttttacagtgcagttttgaaacactctttttgtagaatctgcgaggggatatttggatagatttcaggatttcgttggaaacgggagtatcttcatataaaatctcgacagaagcattctcagaaacttctttgtgatatgtgtattcaagtcacagagttgaatactccctttcacagagtaggtttgaaacactctttttgtagtatctggatgtggacatttggagcgccttgacgcctacggtgaaaagggaaatatcttcccataaaaactagacagtagcaatctcagaatcttctttgggatatatgcacgcagctaacagagttgaatctttctattgacagagcagatttgaaacagtctttctgtggaatctgcaagtggatatttggatagattggaggatttcgttggaaacgggattatgtataaaaagtagacagcagcatcctcagaaacttctttgtgatgtgtgcattcaagtcacagagttgaacattccctttcgtacagcagttttgaaacactctttctgtagtatatggaagtgaacattaggacagctttcaggtctatggtgagaaaggaaatatcttcaaataaaaactagacagaagcattctcataaacttgtttgtgatgtgtgaactcagctatcaacggtggatctttcttttgatagagcagttctgaaaaacactttttgttgaatctgcaagtggacatttggatagttttgaagatttccttggaaacgggaatatcttcatatcaaatctagacagaagcattctcggaaacgtctttgtgatgtttgcattcaactcataaagttgaacattccgtttcagagagcagctttgaggcattctttttgtagtatgtgcaagtggatatttggagcgctctgaggccttctgtgaaaaagcaaatatcttcccataaccactagacagaaacattctcagaaacccctttatgacgtatgcactcacctaacagaaaagaaccttccttttgacagagcagttttgatacactctttttgtagaatctgcaagtggatatttggatagctgtgaagatttcgttggaaacgggaatatcttcctataaaatctagacagatgcattctcagaaacagctctgtgatgtctgcattcaagtcacagagttgaacattgcctttcatagagcaggtttgaaacgctctttttgtattatatggaagtggacgtttcggacgctttgagacccatggtgataaagggaatatattcccctacaagctagaaagaagcattctgtgaaacttgtttgtgatgtgtgtactcaagtaacagagttgaacctttctttttacagagcagttttgaaacactctttctgtagaatctgcgaggggatatttggatagacttcaggatttcattggaaacgggaatatcttcatataaaatctcgacagaagcattctcagaaacttctttgtgatatgtgcattcaagtcacagagttgaatattccctttcacagagtaggtttgaaacactctttttgttgtatctggaagtggacatttggagcgccttgacgcctacggtgaaaagggaaatatcttcccataaaaactagacagaagcaatctcagaatcttgtttgggatatatgcacgcagctaacacagttgaacctttctattgacagagcagttttgaaacattctttctgtggaatctgcaagtggatatttggatagcttggaggatttcgttggaaacgggattacgtatcaaaagtagacagcggcatcctcagaaacttctttgtgatgtgtgcattcaagtcacagagttgaacattccctttcgtacagcagttttgaaacactctttctgtagtatctggaagtgaacattaggacagctttcaggtctatggtgagaaaggaaataccttcaaataaaaactagacagaagcattctcatatacttgtttgtgatgtgtgaactcagctaacagaggtggatctttcttttgatagagcagttctgaaaaacactttttgttgaatctgcaagtggacatttcgatagatttgaagatttcgttggaaacgggaatatcttcatatcaaatctagacagaagcattctcagacacgtctttgcgatgtttgcattcaactcatagagttgaacattccgtttcagagagcagctttgaggcactctttttgtagtatgtgcaagtggatatttggagcgctctgaggcctacggtgaaaaagcaaatatcttcccataaccactagacagaaacattctcagaaactcatttatgacgtatgcactcacctaacagaaaagaaccttccttttgacagagcagttttgatacactctttttgtagaatctgcaagtggatatttggatagctgtgaagatttcgttggaaacgggaatatcttcctataaaatctagacagaagcattctcagaaactgctctgtgatgtctgcattcaagtcacagagttgaacattgcctttcatagagcaggtttgaaacgctctttttgtagtatatggaagtggatgtttcggacggttggaggcccaaggtgataaagggaatatcttcccctacaagctagaaagaagcattctgtgaaacttgtttgtgatgtgtgtactcaactaacagagttgaacctttctttttacagagcagttttgaaacactctttttgtagaacctgcgaggggatatttggatagatttcaggatttcgttggaaacgggaatatcttcatataaaatctcgacagaagcattctcagaaacttctttgtgatatctgcattcaagtcacagagttgaatattccttttcacagagtaggattgaaacactctttttgtagtatcaggaagtggacatttggagcgccttgacgcctacggtgaaaagggaaatatcttcccataaaaactagacagaagcaatctcagaatcttctttgggatatatgcacgcagctaacagagttgaacctttctattgacagagcagttttgaaacagtctttctgtggaatctgcaagtggatatttgtatagcttggaggatttcgttggaaacgggattacgtataaaaagtagacagcagcatcctcagaaaacttctttgtgatgtgtgcattcaagtcacagagttgtacattccctttcgtacagcagttttgaaacactctttctgtagtatctggaagtgaacattaggacagctttcaggtctatggtgagaaaggaaatatcttcaaataaaaactagacggaagcattctcataaacttgtttgtgatgtgtgaactcagctaacagaggtggatctttcttttgatacagcagttttgaaaaacacattttgttgaatctgcaagtggacatttggatagatttgaagatttcgttggaaacgggaatatcttcatatcaaatctagacagaagaattctcagaaacgtctttgtgatgtttgcattcaactcatagagttgaacattccctttcagagaacagctttgaagcactctttttgtagtatgtgcaaggggatatttggagcgctctgaggcctaaggtgaaaaagcaaatatcttcccataaccactagacagaaacattctcagaaactgctttatgacgtatgcactcacctaacagagaagaaccttccttttgacagagcagttttgatacactctttttgtagaatctgcaagtggatatttggatagctgtgaagatttcgttggaaacgagaatatcttcctataaaatctagacagaagcattctcagaaactgctctgtgatatctgtattcaagtcacagagttgaacattgcctttcatagagcaggtttgaaacgctctttttgtagtatatgtaagtggatgtttcggacggttggaggcccatggtgataaagggaatatcttctcctacaagctagaaagaaagcattctgtgaaacttgtttgtgatgtgtgtactcaactaacagcagttgaacctttctttttacagagcagttttgaaacactctttttgtagaatctgcgaggggatatttggatagatttcaggatttcgttggaaaggggaatatcttcatataaaatctcgacagaagcattttcagaaacttctttgtgatatctgcattcaagtcacagagttcaatattcccttccacagagaaggtttgaaacactctttttgtagtatctggaagtggatatttggagcgccttgacacctacggtgaaaagggaaatatcttcccataaaaactagacagaagcaatctcagaatcttccttgggatatatgcacacagctaactgagttgaacttttctattgacatagcagttttgaaacagtctttctgtggaatctgcaagtggatatttggatagcttggaggatttcgttggaaatgggattacgtataaaaagtagacagcagcatcctcagaaacttctttgtgatgtgtgcattcaagtcacagagttgaacattccctttcgtacagcagttttgaaacactctttctgtagtatctggaagtgaaaattaggacagctttcaggtctatggtgagaaaggaaatatcttcaaataaaaactagacagaagcattctcataaacttgattgtgatgtctgaactcagctaacagaggtggatctttcttttgatagagcagttctgaaaaacactttttgttgaatctgcaagtggacatttggatagatttgaagatttcgttggaaacgggaatatcttcatatcaaatctagacagaagcattctcagaaacgtctttgtgatgtttgcattcaactcatagagttgaacattccatttcagagagcagctttgaagcactctttttgtagtatgtgcaagtggatatttggagcgctctgaggcctacggtgaaaaagcaaatatcttcccataaccactatacagaaacattctcagaaactcctttatgacgtatgcactcaactaacagagaaaaaccttccttttgacagagcagttttgatacactctttttgtagaatctgcaagtggatatttggatagctgtgaagatttcgttggaaacgggaatatcttcctataaaatctagacaggagcattctcagaaactgctctgtgatgtctgcattcaagtcacagagttgaacattgcctttcatagagcaggtttgaaacgctctttttgtagtatatggaactggatgtttcggacggtttgaggcccatggtgataaagggaatatcttcccctacaagctagaaagaagcattctgtgaaacttgtttgtgatgtgtgtactcaactaacagagttgaacctttcgttttacagagcagttttgaaccactctttttgtagaatctgcgaggggatatttggatagatttcaggatttcgttggaaacgggaatatcttcatataaaatctcgacagaagcattctcagtaaacttctttgtgatatgtgcattcaagtcacagagttgaatattccctttcacagagtaggtttgaaacactctttttgtagtatctggaagtggacatttggagcgccttgaggcctacggtgaaaagggaaatatcttctcataaaaagtagacagaagcaatctcagaatcttctttgggatatatgcatgcagctaacagagttgaacctttctattgacagagcagttttgaaacagtctttctctggaatctgcaagtggatatttggatagcttggaggatttcgttggaaacgggattacgtataaaaagtagacagcagcatcctcagaaacttctttgtgatgtgtgcattcaagtcacagagttgaacattccctttcgtacagcagttttgaaacactctttctgtagtatctggaagtgaacattaggacagctttcagctctatggagagaaaggaaatatcttcaaataaaaactagacagaagcatcttataaacttgtttgtgatgtgtgaactcagctaacagaggtggatctttcttttgatagagcagttctgaaaaacactttttgttgaatctgcaagtggacatttggatagatttgaagatttcgttggaaacgggaatatcttcatatcaaatctagacagaagcattctcagaaacgtctttgtgatgtttgcattcaactcatagagttgaacattcccttccagagagtagctttgaagcactctttttgtagcatgtgcaagtggacatttggagcgccctgaggcctacggggaaaagcaaatatcttcccataaccactagacagaaacattctcagaaactcctttatgacagtatgcactcacctaacagaaaagaaccttccttttgacagagcagttttgatacactctttttgtggaatctgcaagtggatatttggatagctgtgaagatttcgttgaaaacgggaatatattcctataaaatctagacagaagcattctcagaaactgctctgtggtgtctgcattcaagtcacagagttgaacattgcctttcatagagcaggtttgaaacactctttttgtagtatatggaagtggacgtttcggacggtttgaggcccatggtgatttagggaatatcttcccctacaagctagaaagaagcattctgtgaaacttgtttgtgatgtgtgtactcaactaacagagttgaacgtttctttttacagagcagttttgaaacactccttttgtagaatctgcgaggggatatttggatagatttcaggatttcgttggaaacgggaatatcttcatataaaatctcgacagaagcattctcagaaacttctttgtgatatctgcattcaagtcacagagttgaatattccctttcacagagtaggtttgaaacactctttttgtagtatctggaagtggacattttgagcgccttgacacctacggtaaaaagggaaatatcttcccataaaaactacacagaaggcaatctcagaatcttctttgggatatatgcacgcagctaacagagttgaatctttctgttgacagagcagatttgaaacagtctttctgtggaatctgcaagtggatatttggatagattggaggatttcgttggaaacgggattacgtataaaaagtagacagcagcatcctcagaaacatccttgtgatgtgtgcattcatgtcacagagttgaacattccctttcgtacagcagttttgaaacactctttctgtagtatctgttagtgaactttaggacagctttcaggtctatagtgagaaaggatatatcttcaaataaaaactagacagaagcattctcataaacttgtttgtgatgtgtgaactcagctaacagaggtggatctttcttttgatagagaagttttgaaaaacactttctgttgaatctgcaagtggacatttggatagatatgaagatttcgttggaaacgggaatatcttcatatcaaatctagacagaaggattctcggaaacgtctttgtgatgtttgcattcaactcatagagttgaacattccgtttcagagagcagctttgaagcactctttttgtagtatgtgcaagtggatatttggagcgctctgaggcctacggtgaaaaagcaaatatcttcccataaccactatacagaaacattctcagaaactcctttatgacgtatgtactcaactaacagagaagaacattctttcttttgatacagcagttttgatacactctttttgtagaatctgcaagtgcatatttggatagctgtgaagatttcgttggaaacgggaatatcttcctataaaatctagacagaagcattctcagaaactgctctgtgatgtctgcattcaagtcacagagttgaacattgcctttcatagagcaggtttgaaacgctctttttgtagtatagggaagtggatgtttcggacggttggaggcccatggtgataaagggaatatcttcccctacaagctataaagaagcattctgtgaaacttgtttgtgatgtgtgtactcaactaacagagcctttctttttacagagcagttttgaaaaactctttttgtagaatctgcgaggggatatttggatagatttcaggatttcgttggaaacgggaatatcttcatataaaatctcgacagaagcattctcagaaacttctttgtgatatgtgcattcaagtcacagagttgaatattccctttcacagagtaggttggaaacactctttttgtagtatctggaagtggacatttggagcgccttgacacctacggtgaaaagggaaatatcttcccattaaaaactaaacaaaagcaatctcagaatcttctttgggatatatgcacgcagctaacagagatgaacctttctattgacagagcagttttgaaacagtctttctgtggaatctgcaagtggatatttggatagattggaggatttcgttggaaacgggattacgtataaaaagtagacagcagcatcctcagaaacttctttgtgatgtgtgcattcaagtcacagagttgaacattccctttcgtacagcagttttgaaacactctttctgtagtatctggaagtgaacattaggacagccttcaggtctatgttgagaaaggaaatatcttcaaataaaaactagacagaagcattctcataaacttgtttgtgatgtgtgaactcagctaacacaggtggatctttcttttgattgagcagttctgaaaaacactttttgttgaatctgcaagtggacatttggatagatttgaagatttcgttggaaacgggaatatcttcatatcaaatctagacagaagcattctcagaaacgtctttgcgatgtttgcattcaactcatagagttgaacattccgtttcagagagcagctttgaggcactctttttgtagtatgtccaagtggatatttggagcgctctgaggcctacggtgaaaaagcaaatatcttcccataaccactagacagaaacattctcagaaactcctttataacgtatgcactcacctaacagagaagaaccttccttttgacagagcagttttgatacactctttttgtagaatctgcaagtggatatttggatatctgtgaagatttcgttggaaacgggaatatcttcctataaaatctagacagaagcattctcagaaactgctctgtgatgtctgcattcaagtcacagagctgaacattgcctttcatagagcaggtttgaaacgctctttttgtagtatatggaagtggacgtttctgacagtttgaggcccatggtgataaagggaatatcttcccctacaagctagaaagaagcattctgtgaaacttggttgtgatgtgtgtactcaactaacagagttgaacctttctttttacagagcagttttgaaacactctttttgtagaatctgcgaggggatatttggatagatttcaggatttcgttggaaacgggaatatcttcatataaaatctcgacagaagcattctcagaaacttctttgtgatatctgcctttaagtcacagagttgaatattccctttcacagagtaggtttgaaacactctttttgtagtatctggaagtggacatttggagcgccttgacgcctacagtgaaaagggaaatatcttcccataaaaactagacagaagcaatctcagaatcttctttgggatatatgtacgcagctaatagagttgaacctttctattgacagagcagttttgaaacagtctttctgtggaatctgcaagtggatatttggatagcttggaggattttgttggaaacgggattacgtataaaaagtagacagcagcatcctcagaatcttctttgtgatgtgtgcattcaagtcatagagttgaacattccctttcgtacagcagttttgaaacactctttctgtagtatctgggagtgaacattaggacagctttcaggtctatggtgagaaaggaaatatcttcaaataaaaagtagacagataagcattctcataaacttgtttgtgatgtgtgaactcagctaacagaggtggatctttcttttgatagagcagttctgaaaaacactttttgttgaatctgcaagtggacctttggatagatttgaagatttcgttggaaacgggaatatcttcatatcaaatctagacagaagcattctcagaaacgtctttgtgatgtttgcattcaactcgtagagttgaacattccgtttcagagagcagctttgaagcactctttttgtagtatgtgcaagtggatatttggagcgctctgaggcctacggtgaaaaagcaaatatcttcccataaccactagacagaaacattctcagaaactcctttatgacgtatgcactcacctaacagagaagaaccttccttttgacagagcagttttgatacactctttttgtagaatctgcaagtggatatttggatagctgtgaatatttcgttggaaacgggaatatcttcctataaaatctagacagaagcattctcagaaactgctctgtgatgtctgcattcaagtcacagagttgaacattgcctttcatagagcaggtttgaaacgctctttttgtagtatatggaagaggacgtttcggacggtttgaggcccatggtgataaagggaatatcttcccctacaagctagaaagaagcattctgtgaaacttgtttgtgatgtgtgtactcaactaacagagttgaacctttctttttacagagcagttttgaaacactctttttgtagaatctgcgaggggatatttggatagatttcaggatttcgttggaaacgggaacatcttcatagaaaatctcgacagaagcattctcagaaacttctttgtgatatcttccttcaagtcacagagttgaatattccctttcacagagtaggtttgaaacactctttttgtagtatctggaagtggacatttggagcgccttgacgcctacggtgaaaagggaaatatcttcccataaaaactagacagaagcaatctcagaatcttctttgggatatatgcacgcagctaacagagttgaacctttctattgacagagcagttttgaaacagtctttctgtggaatctgcaagtggatatttggatagcttggaggatttcgttggaaacgggattacgtataaaaggtagacagcagcatcctcagaaacttctttgtgatgtgtgcattcaagtcacagagttgaacattccctttcgtacagcagttttgaaacactctttctgtagtatctggaagtgaacattaggaccgctttcaggtctatggtgagaaaggaaatatcttcaaataaaaattagacagaagcattctcataaacctgttagtgatgtgtgaactcagctaacagaggtggatctttcttttgatagagcagttctgaaaaacactttttgttgaatctgcaagtggacatttggatagatttgaagatttcgttggaaacgggaatatcttcatatcaaatctagacagaagcattctcagaaacgtctttgtgatgttcgcattcaactcatagagttgaacattccctttcagagagcagctttgaagcactctttttgtagtatgtgcaagtggatatttggagcgctctgaggcctacggtgaaaaagcaaatatcttcccataaccactagacagaaacattctcagaaactcctttatgacgtatgcactcacctaacagaaaagaaccttccttttgacagagcagttttgatacactctttttgtagaatctgcaagtggatatttggatagctgtgaagatttcgttggaaacgggaataacttcctataaaatctagacagaagcattctcagaaactgctctgtgatgtctgcattcaagtcacagagttgaacattgcctttcatagagcaggtttgaaacgctctttttgtagtatatgaaagtggatgtttcggacggttggaggcccatggtgataaagggcatatcttcccctacaagctagaaagaagcattgtgtgaaacttgtttgtgatgtgtgtactcaactaacagagttgaacctctctttttacagagcagttttgaaacactctttttgtagaatctgcgaggggatatttggatacatttcagcatttcgttggaaacgggaatatcttcatataaaatctcgacagaagcattctcagaaacttctttgtgatatctgcactcaagtcacagagttgaatattccctttcacagagtaggtttgaaacactctttttgtagtatctggaagtggacatttggagcgccttgacgcctacggtgaaaagggaaatatcttcccataaaaactagacagaagcaatctcagaatcttctttgggatatatgcacgcagctaacagagttgaacctttctattgacagagcagttttgaaacagtctttctgtggaatctgcaagtggatatttggatagcttggaggatttcgttggaaacgggattacgtataaaaagtatacagcagcatcctcagaatcttccttgtgatgtgtgctttcaagtcacagagttgaacattccctttcgtacagcagttttgaaaaactctttctgtagtatctggaagtgaactttaggagagctttcacgtctatagtgagaaaggatatatcttcaaataaaaactagacagaagcattctcataaacttgtttgtgatgtgtgaactcagctaacagaggtggatctttcttttgatagagcagttctgaaaaacactttttgttgaatctgcaagtggacatttggatagatttgaagatttcgttggaaaccggaatatcttcatgtcaaatctagacagaagcattctcagaaacgtcgttgcgatgtttgcattcaactcatagagttgaacattccgtttcagagagcagctttgaggcactctttttgtagtatgtgcaagtggatatttggagcgctctgaggccttcggtgaaaaagcaaatatcttcccataaccactagatggaaacattctcagaaactcctttatgacgtatgcactcacctaacagagaagaaccttccttttgacagagcagttttgatacactctttttgtagaatctgcaagtggatatttggatagctgtgaagatttcgtcggaaacgggaatatcttcccataaaatctagagagaagcattctcagaaactgctctgtgatgtctgcattcaagtcacagagttgaacattccctttcctagagcaggtttgaaacgctctttttgtagtatattgaagtggacatttcggatggtttgaggcccatggtgataaagggaatatcttcccctacaagctagaaagaagcattctgtgaaacttgtttgtgatgtgtgtactcaactaacagagttgaacctttctttttacagaacagtgttgaaacactctttttgtagaatctgcgaggggatatttggatagatttcaggatttcgttggaaacgggaatatcttcatataaaatctcgacggaagcattctcagaaacttctttgtgatatgtgcattcaggtcacagagttgaatattccctttcacagagtaggtttgaaacactctttttgtagtatctggaagtggacatttggagcgccttgacgcctacggtgaaaagggaaatatcttcccataaaaactagacagaagcaatctcagaatcttctttgggatatatgcacgcagctcacagagttgaacctttctattgacagagcagtttagaaacagtccttctgtggaatctgcaagtggatatttggatagcttggaggatttctttggaaacgggattacgtataaaaagtagacagcagcatcctcagaaacttctttgtgatgattgaattcaagtcacagagttgaacattccctttcgtacagcagttttgaaacactctttctgtagtatctggaagtgaacattaggacagctttcaggtctatggtgagaaaggaaatatcttcaaataaaaactagacagaagcattctcataaacttgtgtgtgatgtgtgaactcagctaacagaggtggatctttcttttgatagagcagttctgaaaaacactttttgatgaatctgcaagtggacatttggatagatttgaagatttctttggaaacgggaatatcttcatatcaaatctagacagaagcattcccagaaacgtctttgtgatgtttgcattcaactcatagagttgaacattctctttcagagagcagctttgaagcactctttttgtagtatgtgcaaggggatatttggagcgctctgaggcctaaggtgaaaaagcaaatatcttcccataaccactagacagaaaacattctcagaaactcctttatgacgtatgcactcacctaacagaaaagaaccttccttttgacagagcagttttgatacactctttttgtagaatctgcaagtggatatttggatagctgtgaagatttcgttggaaacgggaatatcttcctataaaatctagacagaagcattctcagaaactgctctgtgatgtctgcattcaagtcacagagttgaacattgcctttcctagaacaggtttgaaacgctctttctgtagtatatggaagtggacgtttcggacggtttgaggcccatggtgataaagggaatatcttcccctacaagctagaaagaagcattctgtgaaacttgtttgtgatgtgtgtactcaactaacagagttgcacctttctttttacagagcagttttgaaacactctttttgtagaatctgcgaggggatatttggatagatttcaggatttcgttggaaacgggaatatcttcatataaaatctcaacagaagccttctcagaaacttctttgtgatatctgcattgaagtcacagagttgaatattccctttcacatagtaggtttgaaacactctttttgtagtatctggaagtggacatttggagcgccttcacgcctacggtgaaaagggaaatatcttcccataaaaactagacagaagcaatctcagaatcttctttgggatatatgcacgtagctagcagagttgaacctttctattgacagagcagttttgaaacagtctttctgtggaatctgcaagtggatatttggatagcttggaggatttcgttggaaacgcgattacgtataaaaagtagacagcagcatcctcagaaacttctttgtgatgtgtgcattcaagtcacagagttgaacattccctttcgtacagcagttttgaaacactctttctgtagtatctgcaagtgaacattaggacagctttcaggtctgtggtgagaaaggaaatatcttcaaataaaaactagacagaagcagtctgataaacttgtttgtgaagtgtgaactcagctaacagaggtggatctttcttttgatacagcagttttgaaaaacactttgttgaatctgcaagtggacatttgtatagatttgaaaatttcgttggaaacgggaatatcttcatataaaatctcgacagaagcattctcagaaacgtctttgtgatgtttgcattcaactcatagagttgaacattccgtttcagagagcagctttgaagcactctttttgtagtatgtgcaagtggatatttggagcgctctgaggcctacggggaaaaagcaaatatcttcccataaccactagactgaaacattctcagaaactcctttatgacgtatgtactcaactaacagagaagaaccttccttttgacagagcagttttgatacactctttttgtagaatctgcaagtggatatttggatagctgtgaagatttcgttggaatcgggaatatcttcctataaaatctagacagaagcattctcagaaactgctctgtgatgtctgcattcaagtcacagagttgaacattgccgttcatagagcaggtttgaaacactctttttgtactatatggaagtggacgtttcggacggtttgaggcccatggtgataaagggaatatcttcccctacaagctagaaagaagcattctgtgaaacttgtttgtgatgtgtgtactcaactaacagggttgaacctttctttttacagagcagttttgcaacactctttttgtagaatctgcgaggggatatttggatagatttcaggatttcgttggaaacgggaatatcttcatataaaatctcgacagaagcattctcagaaacttctttgtgatatctgcattcaagtcacagagttgaatattccctttcacagagtaggtttgaaacactctttttgtagtatctggaagtggacatttggagcgccttgacacctacggtgaaaaggtaaatatcttcccataaaaacgagacagaagcaatctccgaatcttctttgggatatatgcacgcagctaacagagttgaacctttctattgacagagcagttttgaaacagtctttctgtggaatctgcaagtggatatttggatagcttggaggatttcgttggaaaagggattatgtataaaaattagacagcagcatcctcagaaacttctttgtgatgtgtgcattcaagtcacagagttgaacattccctttcgtacagcagttttgaaaaactctttctgtagtatctggaagtgaacattaggacagctttcaggtctatggtgagaaaggcaatatcttcaaataaaaactagacagaagcattctcataaacttgtttgtgatgtgtgaactcagctaacaggcgtggatctttcttttgatacagcagttttgaaaaacactttttgttgaatctgcaagtggacatttggatagatttgaagatttcgttggaaacgggaatatcttcatatcaaatctagacagaagcattctcagaaacgtctttgtgatgtttgcattcaactcatagagttgaacattccgtttcagagagcagctttgaagcactctttttgtagtatgtgcaagtggatatttggagcgatctgaggcctacggtgaaaaagcaaatatcttccaataaccactagacagaaacattctcagaaactcctttatgacgtatgcactcacctaacagaaaagaaccttccttttgacagagcagttttgatacactctttttgtagaatctgcaagtggatatttggatagctgtgaagatttcgttggaaacgggaatatacttcctataaaatctagacagaagcattctcagaaactgctctgtgatgtctgcattcaagtcacagagttgaacattgccgttcatagagcaggtttgaaacactctttttgtagtatatggaagtggacgtttcggacggtttgaggcccatggtgataaagggaatatcttccccaacaagctagaaagaagcattctgtgaaacttctttgtgatgtgtgtactcaactaacagagttgaacctttctttttacagagcagttttgaaacactctttttgtagaatctgcgaggggacatttggatagatttcaggatttcgttggaaacgggaatatcttcatataaaatctcgacagaagcattctcagaaacttctttgtgatatgtgcattcaagtcacagagttgaatattccctttcacagagtaggtttgaaacactctttttgtagtatctggaagtggacatttggagcgccttgacgcctaaggtgaaaagggaaatatcttcccataaaaactagacagaagcaatctcagaatcttctttgggatatatgcacgcagctaacagagttgaaactttctattgacagagcagttttgaaacagtctttctgtggaatctgcaaatggatatttggatagcttggaggatttcgttggaaacgggattacgtataaaaagtagacagcagcatcctcagaaacttctttgtgatgtgtgcattcaagtcacagagttgaacattccctttcgtacagcagttttgaaacactctttctgtagtatctcgaagtgaacattaggacagctttcaggtctatggtgagaaaggaaatatcttcaaataaaaactagacagaagcattctcataaacttgtttgtgatgtgtgaactcagctaacagaggtggatctttcttttgatagagcagttctgaaaaacacgttttgttgaatctgcaagtggacatttggatagatttgaagatttcgttgtaaacgggaatatcgtcatatcaaatctagacagaagcattctcggaaacgtctttgtgatgtttgcattcaacccatagagttgaacattccgtttcagagagcagctttgaagcactctttttgtagtatgtgcaaggggatattttgagcgctctgaggcctaaggtgaaaaagcaaatatcttcccataaccactagacagaaacattctcagaaactcctttatgacgtatgcactcacctgacagaaaagaaccttccttttgacagagcagttttgatacactctttttgtagaatctgcaagtggatatttggatagctgtgaagatttcgttggaaacgggaatatcttcctataaaatctagacagaagcattctcagaaactgctgtgtgatgtctgcattcaagtcacagagttgaacattgcctttcacagagcaggtttgaaatgctctttttgtagtatatggaagtggacgtttcagacggtttgaggcccatggtgataaagggaatatcttcccctacaagctagaaagaagcattctgtgaaacttgtttgtgatgtgtgtactcaactaacagagatgaacctttcttttcacagagcagttttgaaacactctttttgtagaatctgcgaggggatatttggatagatttcagcatttcgttggaaacgggaatatcttcatataaaatctcggcagaagcattctcagaaacttctttgtgatatgtgcattgaagtcacagagttgaatattccctttcacagagtaggtttgaaacactctttttgtagtatctggaagtggacatttggagcgccttgacacctacggtgaaaagggaaatatcttcccctaaaaactagacagaagcaatctcagaatcttctttgggatatatgcacgcagctaacagagttgaacctttctattgacagagcagttttgaaacagcctttctgtggaatctgcaagtggatatttggatagcttggaggacttcgttggaaacgggattaagtataaaaagtagacagcagcatcctcagaaacttctttgtgatgtgtgcattcaagtgacagagttgaacattccctttcgtacagcagttttgaaacactctttctgtagtatctggaagtgaacattaggacagctttcagctctatggtgagaaaggaaatatcttcaaacaaaaactagacagaagcattctcataaacttgtttgtgatgtgtgaactcagctaacagaggtggatctttctcttgatagagcagttctgaaaaacactttttgtagaatctgcaagtggacatttggatagatttgaagatttcgttggaaacgggaatatcttcatatcaaatctagacagaagcattcgcggaaacgtctttgtgacgtttgcattcaactcacagagttgaacattccgtttcagagagcagctttgaagcactctttttgtcgtatgtgcaagtggatatttggagcgctctgaggcctacggtgaaaaagcaaatatcttcccataaccactagacagaaacattctcagaaactcctttatgacgtatgcactcacctaacagaaaagaaccttccttttgccagagcagttttgatacactctttttgtagaatctgcaagtggatatttggatagctgtgaagatttcgttggaaacgggaatatcttcctataaaatctagacagaagccttctcagaaagtgctctgtgatgtctgcattcaagtcacagagttgaacattgcctttcatagagcaggtttgaaacgctctttttgtagtatatggaagtggacgtttcggacggtttgaggcccatggtgataaagggaatatcttcccctacaagctagaaagaatcattctgtgaaatttgtttgtgatgtgtgtactcaactaacagagttgaacctttctttttacacagcagttttgaaacactctttttgtagaatctgcgaggggatatttggatagatttcaggatttcgttggaaacgggaatatcttcatataaaatctcgacagaagcattctcagaaacttctttgtgatatctgcattcaagtcacagagttgaatattccctttcacagagtaggtttgaaacactctttttgtagtatctggaagtggacatttggagcgccttgacacctaaagtgaaaaggtaaatatcttcccataaaaactagacagaagcaatctcagaatctcctttgggatatatgcacgcagctaacagagttgaacctttctattgacagagcagttttgaaacagtctttctgtggaatctgcaagtggatatttggatagcttggaggatttcgttggaaacgggattacgtgtaaaaagtagacagcagcatcctcagaaacttctttgtgatgtttgcattgaagtcacagagttgaacattccctttcgtacagcagttttgaaacactctttctgtagtatctggaagtgaacattaggacagctttcaggtctacggtgagaaaggaaatatcttcaaataaaaactagacagaaagcattctcataaacttgtttgtgatgtgtgaactcagctaacagaggtggatctttcttttgatagagcagttctgaaaaacactttttgttgaatctgcaagtggacatttggatagatttgaagatttcgttggaaacgggaatatcttcatatcaaatctagaccgaagcattctcagaaacgtctttgtgatgtttgcattcaactcatagagttgaacattccgtttcagagagcagctgtgaagcactctttttgtagtatgtgcaaggggatatttggagcgctctgaggcctaaggtgaaaaagcaaatatcttcccataaccactagacagaaacattctcagaaactcctttatgacgtatgtactcacctaagagagaagaaccttccttttgacagagcagttttgatacacacattttgtagaatctgcaagtggatatttggatagctgtgaagatttcgttggaaacgggaatatcttcctataaaatctagacagaagcattctcagaaagtgctctgtgatgtctgcattcaagtcacagagttgaacattgcctttcatagagcaggtttgaaacactctttttgtagtatttggaagtggacgtttcggacggtttgaggcccatggtgataaagggaatatcttcccctacaagctagaaagaagcattgtgtgaaacttgtttgtgatgtgtgtactcaactaacagagttgaacctttctttttacagagcagttttgaaacactctttttgtagaatctgcgaggggatatttggatagatttcagcatttcgttggaaacgggaatatcttcatataaaatctcgacagaagcattctcagaaacttcccttgtgatatgtgcattcaagtcacagagttgaatattccctttcacagagtaggtttgaaacactctttttgtagtatctggaagtggacatttggagcgcctggacgcctacggtgaaaagggaaatatcttcccataaaaactagacagaagcaatctcagaatcttctttgggatatatgcacgcagctaacagagttgaacctttctattgacagagcagttttgaaacagtctttctgtggaatctggaagtggatattcggatagcttggaggatttcgttggaaacgggattaagtataaaaagtagacagcagcatcctcagaaacttctttgtgatgtgtgcattcaagtcacagagttgaacattcccttttgtacagcagttttgaaacactctttctgtagtatctggaagtgaactttaggagagctttcaggtctatagtgagaaaggttatatcttcaaataaaaactagacagaagcattctcataaacttgtttgtgatgtgtgaactcagctaacagaggtggatctttcttttgatagagcagttctgaaaaacacgttttgttgaatctgcaagtggacatttggatagatttgaagatttcgttggaaacgggaatatcttcatatcaaatctagacagagcattctcagaaacgtctttgtgatgtttgcattcaactcatagagttgaacattccgtttcagagaccagctttgaagcactctttttgtagtatgtgcaagtggatatttggagcgctctgaggcctacggtgaaaaagcaaatatcttcccataaccactagacagaaacattctcagaaacttctttatgatgtatgtacacaactaacagagttgaaccttccttttgacacaacagttttgatacactctttttgtagaatctgcaattggatatttggatatctttgaagatttcattggaaatgggaatatcttcatataaaatctagacagaagcattctcagaaactgctctgtgatgtctgcattcaagtcacagagttgaacattgcctttcatagagcaggtttgaaacgctctttttgtagtgtatggaagtggacgtttcggacggtttgaggcccatggtgataaagggaatatcttcccctacaagctagaaagaagcattctgtgaaacttgtttgtgctgtgtgtactcaactaacagagttgaacctttctttttacagagcagttttgaaacactctttttgtagaatctgcgaggggatatttggatagatttcaggatttcgttggaaacgggaatatcttcatataaaatctcgacagaagaccgaagcattcgcagaaacttcttcgtgatatgtgcattcaagtcacagagttgaatattccctttcacagagtaggtttgaaacactctttttgtagtatctggaagtggacatttggagcgccttgacgcctatggtgaaaagggaaatatcttcccataaaaactagacagaagcaatctcagaatcttctttgggatatatgtacgcagctaacagagttgaacctttctattgacagagcagttttgaaagagtctttctgtggaatctgcaagtggatatttggatagcttggaggatttcgttggaaacgggattacgtataaaaagtagacagcagcatcctccgaaacttctttgtgatgtgtgcattcaagtcacagagttgaacattccctttcatacagcagttttgaaacactctttctgtagtatctggaagtgaacattaggacagctttcagctctatggtgagaaaggaaatatcttcaaataaaaactagacagaaagcattctcaaaaacttgtttgtgatgtgtgaactcagctaacagaggtggatctttcttttgatagagcagttctgaaaaacactttttgttgaatctgcaagtggacatttggatagatttgaagatttcgttggaaacgggaataccttcatatcaaatctagacagaagcattctcagaaacgtctttgcgatgtttgcattcaactcatagagttgaacattccttttcagagagcagctttgaggcactctttttgtagtatgtgcaagtggatatttggagcgctctgaggcctacggtgaaaaagcaaatatcttcccataaccactagacagaaacattctcagaaactcctttatgacgtatgcactcaactaacagggaagaaccttccttttgacagagcagttttgatacactctttttgtagaatctgcaagtggatatttggatagctgtgaagatttctttggaaacgggaatatcttcctataaagtctggacagaagcattctcagaaactgctctgtgatgtctgcattcaagtcacagagttgaacattgcctttcatagagcaggtttgaaacgctctttttgtagtatatggaagtggacttatcggacgttttgaggcccatggtgataaagggaatatcttcccctacaagctagaaagaagcattgtgtgaaacctgtttgtgatgtgtgtactcaactaacagagttgaacctttctttttacagagcagttttgaaacactctttttgtagaatctgcaaggggatatttggatagatttcaggatttcgttggaaacgggaatatcttcatataaaatctcgacagaagcattctcagaaacttctttgtgatacgtgcattctagtcacacagttgaatattccctttcacagagtaggtttgaaacactctttttgtagtatctggaagtggccatttggagcgccttgacacctacggtgaaaagggaaatatcttcccataaaaactagacagaagcaatctcagaatcttctttgggatatatgcacgcagctaacagagttgaacctttctattgacagagcagttttgaaacagtctttctgtggaatctgcaagtggatatttggatagattggaggatttcgctggaaacgggattacgtataaaaagtagacagcagcatcctcagaaacttctttgtgatgtgtgcattcaagtcacagagttgaacattccctttcgtacagcagttttgaaacactctttctgtagtatctggaagtgaacattaggacagctttcaggtctatggtgcgaaaggaaatatcttcaaataaaaactagacagaagcattctcataaacttgtttgtgatgtgtgaactcagctaacagacgtggatctttcttttgatacagaagttttgaaaaacactttttgttgaatctgcaagtggacatttggatagatatgaagatttcgttggaaacgggaatatcttcatatcaaatctagacagaagcattctcagaaacgtctttgcgatgtttgcattcaactcatagagttgaacattccgtttcagagaacagctttgaagcactctttttgtagtatgtgcaagtggatatttggagcgctctgaggcctacggtgagaaagcaaatatcttcccataaccactagacggaaacattctcagaaactcctttatgacgtatgcactcacctaacagagaagaaccttccttttgacagagcagttttgatacactctttttgtagaatctgcaagtggatatttggatacctgtgaagatttcgattggaaacgggaatatcttcctataaaatctagacagaagcattctcagaaactgctctgtgatgtctgcattcaagtcacagagttgaacattgcctttcctagagcaggtttgaaatgctctttttgtagtatatggaagtagacgtttcggacggtttgaggcccatggtgataaagggaatatcttcccctacaagctagaaagaagcattctgtgaaacttgtttgtgatgtgtgtactcaactaacagagttgaaactttctttttacagagcagttttgaaacactctttttgtagaatctacgaggggatatttggatagatttcaggatttcattggaaacgggaatatcttcatataaaatctcgacagaagcattctcagaaacatctttgtgatatctgcattccagtcacagagttgaatattccctttcacagagtaggtttgaaacactctttttatagtatctggaattggacatttggagcgccttgacgcctacggtgaaaagggaaatatcttccgataaaaactagacagaagcaatctcagaatcttctttgggatatatgccacgcagctaacagagttgaacctttctattgacagagcagttttgaaacagtctttctgtggaatctgcaagtggatatttggatagcttggaggatttcgttggaaacgggattacgtataaaaagtagacagcagcatcctcaggaaacttctttgtgatgtgtgcattcaagtcacagagttgaacattccctttcgtacagcagttttgaaacactctttctgtagtatctggaagtgaacattaggacagctttcaggtctatggtgagaaaggaaatatcttcaaataaaaactagacggaagcattctcataaacttgtttgtgatgtgtgaactcagctaacagaggtggatctttcttttgatagagcagttctgaaaaacactttttgttgaatctgctagtggacatttggatagatttgaagatttcgttggaaacgggaatatcttcatatcaaatctagacagaagcattctcagtaaacgtctttgcgatgtttgcattcaactcatagagttgaacattccctttgagagagcagctttgaagcactctttttgtagcatgtgcaagtggacatttggagcgccctgaggcctacggggaaaaagcaaatatcttcccataaccactagacagaaacattctcagaaactcctttatgacgtatgtactcacctaacagagaagaaccttccttttgacagagcagttttgatacactctttttgtagaatctgcaagtggatatttggatagctgtgaagatttccctggaaacgggaatatcttcctataaaatctagacagaagcattctcagaaactgctctgtgatgtctgcattcaagtcacagagttgaacattgcctttcatagagcaggtttgaaacgctctttttgtagtatatggaagtggatgtttccgacggtttgaggcccatggtgataaagggaatatcttcccctacaagctagaaagaagcattgtgtgaaacttgtttgtgatgtgtgtactcaactaacagagttgaacctttctttttacagagcagttttgaaacactctttttgtagaatctgtgaggggatatttggatagatttcaggatttcgttggaaacgagaatatcttcatataaaatctcgacagaagcattctcagaaacttctttgtgatatctgcattcaagtcacagagttgaatattgcctttcacagagtaggtttgaaacactcttcttgtagtatctggaagtggacattttgagcgccttgacacctacggtgaaaagggaaatatcttcccataaaaactagacagaagcaatctcagaatcttctttgggatatatgcacgcagctaacagagttgaacctttctattgacagagcagttttgaaacagtctttctgtggaatctgcaagtggatatttggatagcttggaggatttcgttggaaacgggatacgtataaaaagtagacagcagcatcctcagaaacttctttgtgatgtgtgcattcaagtcacagagttgaacattccctttcgtacagcagttttgaaacactctttctgtagtatctggaagtgaacactaggagagctttcaggtctatggtgagaaaggaaatatcttcaaataaaaactagacagaagcattctcataaacttgtttgtgatgtgtgaactcagcttacagaggtggatctttcttttgatagagcagttctgaaaaacacattttgttgaatctgcaagtggacatttggatagattttaagatttcgttggaaacgggaatatcttcatatcaaatctagacagaagcattctcagaaacgtctttgtgatgtttgcattcaactcatagagttgaacattccgtttcagagagcagctttgaagcactctttttgtagcatgtgcaagtggatatttggagcgctctgaggcctacggtgaaaaagcaaatatcttcccataaccactagacagaaacattctcagaaactcctttatgacgtatgcactcacctaacagagaagaaccttccttttgacagagcagttttgatacactctttttgtagaatcggcaagtggatatttggatagctgtgaagatttcgttggaaacgggaatatcttcctataaaatctagacagaagcattctcagaaacagctctgtgatgtctgcattcaagtcacagagttgaacattgcctttcatagagcaggtttgaaacgctctttttgtagtatatggaagtggacgtttcggacggtttgagacccatggtgataaagggaatatattcccctacaagctagaaagaagcattctgtgaaacctgtttgtgatgtgtgtactcaactaacagagttgaacctttctttttacagagcagttttgaaacactctttttgtagaatctgcgaggggatatttggatagatttcaggatttcgttcgaaacgggaatatcttcatataaaatctcgacagaagcattctcagaaacttctttgtgatatgtgcattcaagtcacagagttgaatattccctttcacagagtaggttagaaacactctttttgtagtatctggaagtggacatttggagcgccttgacacctacggtgaaaagggaaatatcttcccataaaaagtagacagaagcaatctcagaatcttctttgggatatatgcacgcagctaacagagttgaacctttctattgacagagcagttttgaaacagtctttctgtggaatctgcaagtggatatttggatagcttagaggatttcgttggaaacgggattacgcataaaaagtagacagcagcatcctcagaaacttctttgtgatgtgtgcattcaagtcacagagttgaacattccctttcgtacagcagttttgaaacactctttctgtagtatctggaagtgaacactaggacagctttcaggtctatggtgagaaaggaagtatcttcaaataaaaactagacagaagcattctcataaacttgcttgtgatgtgtgaactcagctaacagaggtgaatctttcttttgatagagcagttctgaaaaacactttttgttgaatctgcaagtggacatttggatagatttgaagatttcgttggaaacgggaatatcttcatatcaaatctagacagaagcattctcagaaacgtctttgtgatgattgcattcaactcatagagttgaacattccctttcagagagcagctttgaagcactctttttgtagtatgtgcaagtggatatttggagcgctctggggcctacggtgaaaaagcaaatatcttcccataaccactagacagaaacattctcagaaactcctttatgaagtatgcactcacctaagagagaagaaccttccttttgacagagcagttttgatacactctttttgtagaatctgcaagtggatattttgatagctgtgaagatttcgttggaaacgggaatatcttcctataaaatctagacagaagcattctcagaaactgctgtgtgatgtctgcattcaagacacagagttgaacattgcctttcatagagcaggtttgaaacgctctttttgtagtatatggaagtggacgtttcggacgttttgaggcccatggtgatacagcgaatatcttcccctaccagctagaaagaagcattctgtgaaacttgtttgtgatgtgtgtactcaactaacagagttgaacctttctttttacagagcagttttgaaacactctttttgtagaatctgcgaggggatatttggatagatttcaggatttcgttggaaacaggaatatcttcatataaaatctcgacagaagcattctcagaagcttctttgtgatatgtgcattcaagtcacagagttgaatattccctttcacagagtaggtttgaaacactctttttgtagtatctggaagtggacatttggagcgccttgacgcctgcggtgaaaagggaaatatcttctcataaaaagtagacagaagcaatctcagaatcttctttgggatatatgcacgcagctaacagagttgaacctttctattgacagagcagttttgaaacagtctttctgtggaatctgcaagtggatatttggatagcttggaggatttcgttggaaacgggattacgtatataaagtagaccgcagcatcctcagaaacttctttgtgatgtgtgcattcaagtcacagagttgaacattccctttcgtacagcagttttgaaacactctttctgtagtatctggaagtgaacattaggacagctttcaggtctatggttagaaaggaaatatcttcaaataaaaactagacagaagcattctcataaacttgtttgtgatgtgtgaactcagctaacagaggtggatctttcttttgatagagcagttctgaaaaacactttttgttgaatctgcaagtggacatttggatagatttgaagatttcgttgaaaacgggaatatcttcatatcaaatctagacagaagcattctcagaaacgtctttgtgatgtttgcattcaactcatagagttgaacattccgtttcagagagcagctttgaagcactcttcttgtagtatgtgcaagtggatatttggagcgctctgaggcctacggtgaaaaagcaaatatcttcccataaccactagacagaaacattctcagaaactcctttatgacgtatgcactcacctaacagggaagaaccttccttttgacagagcagttttgatacactctttttgtagaatctgcaagtggatatttggatagctgtgaagatttcgttggaaacgggaatatcttcctataaaatctagacagaagcattctcagaaactgctctgtgatgtctgcattcaagtcacagagttgaacattgcctttcatagagcaggtttgaaaggctctttttgtactatatggaacaggacgtttcgacggtttgaggaccatggtgataaagggaatatcttcccctacaagctagaaagaaagcattgtgtgaaacttgtttgtgatgtgtgtactcaactaacagagttgaacctttctttttacagagcagttttgaaacactctttttgtagaatctgcaaggggatatttggatagatttcaggatttcgttggaaacgggaatatcttcatataaaatctcgacagaagcattctcagaaacttctttgtgatatctgcctttaagtcacagagttgaatattccctttcacagagtaggtttgaaacactctttttgtagtatctggaagtggacatttggagcgccttgaggcctacggtgaaaagggaaatatcttctcataaaaactagacagaagcaatctcagaatcttctttgggatatatgcatgcagctaacagagttgaacctttctattgacagagcagatttgaaacagtctttctgtggaatctgcaagtggatatttggatagcttggaggatttcgttggaaacgggattacgtataaaaagtagacagcagcatcctcagaaacatccttgtgatgtgtgcattcaagtcacagagttgaacattccctttcgtacagcagttttgaaacacactttctgtagtatctggaagtgaactttaggacagctttcaggtctatagtgagaaaggatatatcttcaaataaaaactagacggaagcattctgataaacttgtttgtgaagtttgatctcagctaacagaggtggatctttcttttgatagagcagttctgaaaaacactttgttgaatctgcaagtggacatttggatagatttgaagatttcgttggaaacgggaatatcttcatatcaaatctagacagaagcattctcagaaacgtctttgtgatgtttgcattcaactcatagagttgaacattccgtttcagagagcagctttgaagcactctttttgtagtatgtgcaagtggatatttggagcgctctgaggcctacggtgaaaaagcaaatatcttcccataaccactagacggaaacattctcagaaactcctttatgacgtatgcactcacctaacagagaagaaccttccttttgacagagcacttttgatacactctttttgtagaatctgcaagtggatatttagatagctgtgaagatttctttggaaacgggaatatcttcctataaaatctagacagaagtatactcagaaactgctctgtgatgtctgcattcaagtcacagagttgaacattgcctttcatagagcaggtttgaaacgctctttttgtagtatatggaagtggacgtttcggacagtttgaggcccatggtgataaaggaaatatcttcccctacaagctagaaagaagcattctgtgaaacttgtttgtgatgtgtgtactcaactaacagggttgaacctttccttttacagagcagttttgcaacactctttttgtagaatctgcgaggggatatttggatagctgtgaagatttcgttggaaacgggaatatcttcctataaaatctagacagaagcattctcagaaacttctttgtgatatgtgcatccaagtcacagagttgaatattccctttcacagagtaggtttgaaacaccctttttgtagtatctggaagtggacatttggagcgccttgacacctacggtgaaaagggaaatatcttcccataaaaactagacagaagcaatctcagaatcttctttgtgatatatgcacgcagctaacagagttgaacctttctattgacagagcagttttgaaacagtctttctgtggaatctgcaagtggatatttggatagcttggaggacttcgttggaaacgggattacgtataaaaagtagacagcagcattctcagaaacttctttgtgatgtgtgcattcaagtcaaagagttgaacattccctttcgtacagcaggtttgaaaaactctttctctagtacctggaagtgaacgtttcgagacctttcaggtctatggtgagaaaggaaatatcttcaaataaaaactagacagaagcattctcataaacctgtttgtgatgtgtgaactcagctaaccgaggtggatctttcttttgatagagcagttctgaaaaacactttttgttgaatctgcaaggggacatttggatagatttgaagatttcgttggaaacgggaatatcttcatatcaaatctagacagaagcattctcagaaacgtctttgtgatgtttgcattcaactcctagagttgaacattccgtttcagagagcagctttgaggcactctttttgtagtatgtgcaagtggatatttggagcgcactgaggcctacggtgaaaaagcaaatatcttcccataaccactagacagaaacattctcagaaacttctttatgacgtatgtactcaactagcagagaagaactttccttttgacagagcatttctgatacactcttgttgtactatctgcaagtggatatttggatagctgtgaagatttcgttggaaacgggaatatcttcctataaagtctggacagaagcattctcagaaagtgctctgtgatgtctgcattcaagtcacagagttgaacattgcctttcatagagcaggtttgaaacgctctttttgtagtatatggaagtggacgtttcggacggtttgaggcccatggtgataaagggaatatcttcccctacaagctagaaagaagcattctgtgaaacttgtttgtgatatgtgtactcaactaacagagttgaacctttctttttacagagcagttttgaaacactctttttgtagaatctgcgaggggatatttggatacatttcagcatttcgttggaaacgggaatatcttcatataaaatctcgacagaagcattctcagaaacttctttgtggtatgtgcattcaagtcacagagttgaatattccctttcacagagtatgtttgaaacactctttttgtagtatctggaagtgtacatttggagcgccttgacgcctacggtgaaaagcgaaatatcttcccataaaaactagacagaagcaatctcagaatcttctttgggatatatgcacgcagctaagagagttgaatctttctattgacagagcagatttgaaacagtctttctgtggaatctgcaagtggatatttggatagattggaggatttcgttggaaacgggattacgtataaaaagtagacagcagcatcctcagaaacttctttgtgatgtgtgcattcaagtcacagagttgaacattccctttcgtacagcagttttgaaaccctctttctgtagtatctggaagtgaacattaggacagctttcagctctatggtgagaaaggaaatatcttcaaataaaaactagacagaagcattctcataaacttgtttgtgatgtgtgaactcagctaacagaggtggatctatcttttgatagagcagttctgaaaaacactttttgtagaatctgcaagtggacatttggatagatttgaagatgtcgttggaaacgggaatatcttcatatcaagtctagacagaagcattctcagaaacgtctttgtgatgtttgcattcaactcatagagttgaacattccgtttcagagagcagctttgaagcactctttttgtagtatgtgccagtggatatttggagcgctctgaggcctacggtgaaaaagcaaatatcttcccataaccactagacagaaacattctcagaaactcctttatgacgtatgcactcacgtaacagagaagaaccttccttttgactgagcagttttgatacactctttttgtagaatctgcaagtggatatttggatagctgtgaagatttcgttggaaacgggaatatcttcctataaaatctagacagaagcattctcagaaactgctctgtgatgtctgcattcaagtcacagagttgaacattgcctttcatagagcaggtttgaaacgctctttttgtactatatggaagaggacgtttcgaacggtttgaggcccatggtgataaagggtatatcttcccctacaagctagaaagaagcattctgtgaaacttgtttgtgatgtgtgtactcaagtaacagagttgaacctttctttttacagagcagttttgaaacactctttctgtagaatctgcgaggggatatttggatagatttcagggtttcgttggaaacgggaacatcttcatataaaatctcgacagaagcattctcagaaacttctttgtgatatctgccttcaagtcacagagttgaatattccctttcacagagtaggtttgaaacactctttttgtagtatcttgaagtggacatttggagcgccttgacgcctacggtgaaaagggaaatatcttcccataaaaactagacagaatcaatctcagaatcttctttgggatatatgcacgcagctaacagagttgaacctttctattgacagagcagttttgaaacagtctttctgtggaatctgcaagtggatatttggatagcttggaggatttcgttggaaacgggattacgtataaaaagtagacagcagcatcctcagaaacttctttgtgatgtgtgcattcaagtcacagagttgaacattccctttcgtacagcagttttgaaacactctttctgtaatatctggaagtgaacattaggacagctttcaggtctatggtgagaaaggaaatatcttcaaataaaaactagacagaagcattctcataaacttgtttgtgatgtgtgaactcagctaacagaggtggatctttcttttgatagagcagttctgaaaaacactttttgttgaatctgcaagtggacatttggatagatttgaatatttcgttggaaacgggaatatcgtcatatcaaatctagacagaagcattctcagaaacgtctttgtgatgtttgcattcaactcgtagagttgaacattccgtttcagagagcagctttgaggcactctttttgtagtatgtgcaagtggatatttggagcgctctgaggcctacggtgaaaaagcaaatatcttcccataaccactagacagaaacattctcagaaactgctttatgacgtatgcactcacctaacagagaagaaccttccttttgacagagcagttttgacacactctttttgtagaaactgcaagtggatattgggatagctgtgaagatttcgttggaaacgggaatatcttcctataaaatctagacagaagcattctcagaaactgctctgtgatgtctgcattcaagtcacagagttgaacattgcctttcatagagcaggtttgaaaagctctttttgtagtatatggaagtggacgtttcacacggtttgaggccgatggtgataaagggaatatcttcccctacaagctagaaagaagcattctgtgaaacttctttgtgatgtgtgtactcaactaacagagttgaacctttctttttacagagcagttttgaaacactctttttgtagaatctgcgaggggatatttggatacatttcaggatttcgttggaaacaggaatatcttcatataaaatctcgacagaagcattctcagaaacttctttgtgatatgtgcattcaagtcacagagttgaatattccctttcacagagtaggtttgcaacactctttttgtagtatctggaagtggacatttggagcgccttgacacctacggtgaaaagggaaatatcttcccataaaaactagacagaagcaatctcagaatcttctttgggatatatgcacgcagctaacagagttgaacctttctattgacagagtagttttgaaacagtctttttgtggaatctccaagtggatatttggatagcttggaggatttcgttggaaacgggattacgtataaaaagtagacagcagcatcctcagaaaccttctttgtgatgtgtgcattcaagacacagagttgaacattccctttcgtacagcagttttgaaacgctctttctgtagtatctggaagtgaacattaggacagctttcaggtctatcgtgagtaaggaaatatcttcaaataaaaactagacagaagcattctcataaacttgtttgtgatgtgtgaactcagctaacagaggtggatctttcttttgatagagcagttctgaaaaacactttttgttgaatctgcaagtggacatttggatagatttgaagatttcattggaaacgggaatatcttcatatcaaatctagacagaagcattctcagaaacgtctttgtgatgttagcattcaactcatagagttgaacattccctttcagagagcagctttgaagcactctttttgtagtatgtgcaagtggacatttggagcgctttgaggcctacggtgaaaaagcaaatatcttcccataaccactagacagaaacattctcagaaactcctttatgacgtatgtactcaactaacagagaagaaccttccttttgacagagcagttttgatacactctttttgtagaatctggaagtggatatttggatagctgtgaagatttcgttggatacgggaatatcttcctataaaatctagacagaagcattctcagaaactgctctgtgatgtctgcattcaagtcacagagttgaacattgcctttcatagagcaggtttgaaacactctttttttagtatatggaagtggacgtttcggacggtttgaggcccatggtattaaagggaatatcttcccctacaagctagaaagaagcattctgtgaaacttgtttgtgatgtgtgtactcaattaacagagttgaacctttctttttacagagcagttttgaaacactctttttgtagaatctgcgaggggatatttggatagatttcaggatttcgttggaaacgggaatatcttcatataaaatctcgacagaagcattctcagaaacttctttgtgatatctgcattcaagtcacagagttcaatattccctttcacagagtaggtttgaaacactctttttgtagtatctggaagtggacatttggagcgccttgacacctacggtgaaaagggaaatatcttcccataaaaactagacagaagcaatctcagaatcctctttgggatatatgcacgcagctaacagagttgaacctttctattgacagagcagttttgaaacagtctttctgtggtatctgcaagtggatatttggatagcttggaggatttcgttggaaacgggattacgtataaaaagtagacagcagcatcctcagaaacttccttgtgatgtgtgcattcaagtcacagagttgaacattccctttcgtacagcagttctgaaacactctttctgtagtatctggaagtaaacagcacagctttcaggtctatggtgagaaaggaaatatcttcaaataaaaactagacagaagcattctcataaacttgtttgtgatgtgtgaactcagctaatagaggtggatctttcttttgatagagcagttctgaaaaacactttttgttgaatctgcaagtggacatttggatagatttgaagatttcgttggaaacgggaatatcttcatatcaaatctagacagaagcattctcagaaacgtctttgtcatgtttgcattcaactcatagagttgaacattccgtttcagagagcagctttgaagcactctttttgtagtatatgcaagtggatatttggagcgctctgaggcctacggtgaaaaagcaaatatcttcccataaccactagacagaaacattctcagaaactcctttatgacgtatgcactcacctaacagaaaagaaccttccttttgacagagcagttttgatacactctttttgtagaatctgcaagtggatatttggatagctgtgaagatttcgttggaaacgggaatatcttcatatcaaatctagacagaagcattctcagaaactgctctgtgatgtctggattcaagtcacagagttgaacattgcctttcatagagcaggtttgaaacgctctttttgtagtatatggaagtggacgtttcggacggtttgaggcccatggtgataaagggaatatcttcccctacaagctagaaagaagcattctgtgaaacttgtttgtgatgtgtgtactcaactaacagagttgaacctttctttttacagagcagttttgaaacactctttttgtagaatctgcgagggaatatttggatagatttcaggatttcgttggaaacgggaatatcttcatataaaatctcgacagaagcattctcagaaacttcattgtgatatctgcattcaagtcacagagttgaatattccctttcacagagtaggtttgaaacactctttttgtagtatctggaagtggacatttggagcgccttgacacctacggtgaaaagggaaatatcttcccctaaaaactagacagaagcaatctcagcaatcttgtttgggatatatgcacgcagctaacacagttgaacctttctattgacagagcagttttgaaacattctttctgtggaatctgcaagtggatatttggatagcttggaggatttcgttggaaacgggattacgtatcaaaagtagacagcagcatcctcagaaactactttgtgatgtgtgcattcaagtcacagagttgaaaattccctttcctacagcagttttgaaacactctttctgtagtatctggaagtgaacattaggacagctttcaggtctatagtgagaaaggatatatcttcaaataaaaactagacagaagctttctcataaacttgtttgtgatgtgtgaactcagctaacagaggtggatctttcttttgatacagcagttttgaaaaacactttttgttgaatctgcaagtggacatttggatagatatgaagatttcgttggaaacgggaatatcttcatatcaaatctagacagaagcattctcagaaacgtctttgtgatgtctgcattcaactcatagagttgaacattccctttcagagagcagctttgaagcactctttttgtagcatgtgcaagtggacatttggagcgccctgaggcctacggggaaaaagcaaatatcttcccataaccactagagagaaacattctcagaaactcctttatgaggtatgcactcacctaacagagaagaaccttccttttgacagagcagttttgatacactctttttgtagaatctgcaagtggatatttggatacctgtgaagatttcgttggaaacgggaatatcttcctataaaatctagacagaagcattctcagaaactgctctgtgatgtctgtattcaagtcacagagttgaacattgcctttgatagagcaggtttgaaacgctctttttgtagtatatggaagtggatgtttcggacggttggaggcccatggtgataaagggaatatcttcccctacaagctagaaagaagcattctgtgaaacttgtttgtgatgtgtgtactcaactaacagagttgaacctttctttttacagagcagttttgaaacactctttttgtagaatctgccaggggatatttggatacatttcaggatttcgttggaaacgggaatatcttcatataaaatctcgacagaagcattctcagaaacttctttgtgttatctgcattcaagtcacagagttgaatattccctttcacagagtaggtttgaaacactctttttgtagtgtctgaaagtggacatttggagcacattgacacctacggtgaaaagggaaatatcttcccataataactagacagaagcaatctcagaatcttctttgggatatatccacgcagctaacagagttgaacctttctattgacagagcagttttgaaacagtctttctgtggaatctgcaagtggatatttggatagcttggaggatttcgttggaaacgggattacgtataaaaagtagacagcagcatcctcagaaacttctttgtgatgtgtgcattcaagtcacagagttgaacattccctttcgtacagcagttttgaaacgctctttctgtagtatatggaagtgaacattaggacagctttcaggtctatggtgagaaaggaaatatcttcaaataaaaactagacagaagcattctgataaacttgtttgtgaagtgtgaactcagctaacagaggtggatctttctttcgacacagcagttttgaaaaacactttttgttgaatctgcaagtagacatttggatagatttgaagatttcgttgaaaacgagaatatgttcatttcaaatctagacagaagcattctcagaaacgtctttgtgatgtttgcattcaactcatagtgttgaacattccctttcagagagcagctttgaagcactgtttttgtagtatgtgcaagtggacatttggagcgctttgagccctacggggaaaaagcaaatatcttcccgtaaccactagacagaaacattctcagaaacccctttatgacgtatgcactcacctaacaggagaagaaccttccttttgactgagcagttttgatacactctttttgtagaatctgcaagtggatatttggatagctgtgaagatttcgttggaaacgggaatatcttcctataaaatctagacagaagcattctcagaaactggtctgtgatgtctgcattcaagtcacagagttgaacattgcctttcctagagcaggtttgaaatgctctttttgtagtatatggaagtggacgtttcggacggtttgaggcccatggtgataaagggaatatcttcccctacaagctagaaagaagcattttgtgaaacttgtttgtgatgtgtgtactcaactaacagagttgaacctttctttttacagagcagttttgaaacactctttttgtagaatctgcgaggggatatttggatagatttcaggatttcgttggaaacgggaatatcttcatataaaatctcgacagaagcattctcagaagcttctttgtgatatgtgcattcaagtcacagagttgaatattccctttcacagagtaggtttgaaacactctttttgtagtatctggaagtggacatttggagcgccttgacgcctacggtgaaaagggaaatatcttctcataaaaactagacagaagcaatctcagaatcttctttgggatatatgcacgcagctagcagagttgaacctttctattgacagagcagttttgaaacagtctttctgtggaatctgcaagtggatatttggatagcttggaggatttcgttggaaacgggattacgtataataagtagacagcagcatcctcagaaacttctttgtgatgtgtgcattcaagtcacagtgttgaacattccctttcgtacagcagttttgaaacactctttctgtagtatctggaagtgaacattaggactgctttcaggtctatggtgagaaaggaaatatcttcaaataaaaactagacagaagcattctcataaacttgtttgtgatgtgtgaactcagctaacagacgtggatctttcttttgatacagcagttttgaaaaacactttttgtagaatctgcaagtggacatttggatagatttgaagatttcgttggaaacgggaatatcttcatatcaaatctagacaaaagcattctcagaaacgtctttgtgatgtttgcattcaactcatagagttgaacattccgtttcagagaccagctttgaagcactctttttgtagtatgcgcaagtggatatttggagcgctctgaggcctacggtgaaaaagcaaatatcttcccataaccactagacagaaacattctcagaaactcctttatgacgtatgcactcacctaacagagaagaaccttacttttgacagagcagttttgatacactctttttgtagaatctgcaagtggatatttggatagctgtgaagatttcgttggaaacgggaatatcttcctataaaatctagacagaagcattctcagaaactgctctgtgatgtctgcattcaagtcacagagttgaacattgcctttcttagaacaggtttcaaacgctctttttgtagtatatggaagtggacgtttcagacggtttgaggcccatggtgataaagggaatatcttcccctacaagctagaaagaagcattctgtgaaacttgtttgtgaggtgtgtactcaactaacagagttgaacctttcttttcacagagcagttttgaaacactctttttgcagaatctgcgaggggatatttggatagatttcaggatttcgttggaaacgggaatatcttcatataaaatctcgacagaagcattctcagaaacttctttgtgatatgtgcattcaagtcacagagttgaatattccctttcaccaagtaggtttgaaacactctttttgtagtatctggaagtggacatttggagcgccttgacgcctacggtgaaaagggaaatatcttcccataaaaactagacagaagcaatctcagaatcttctttgggatatatgcacgcagctaacagagttgaacctttctattgacagagcagttttgaaacagtctttctgtggaatctgcaagtggatgtttggatagcttggaggatttcgttggaaacgggattacgtataaaaagtagacagcggcatcctcagaaacttctttgtgatgtgtgcattcaagtcagagagttgaacattccctttcgtacagcagttttgaaacactctttctgtagtatctggaagtgaacattaggacagctttcaggtctatggtgagaaaggaaataccttcaaataaaaactagacagaagcattctcataaacttgtttgtgatgtgtgaactcagctaacagaggtggatctttcttttgatagagcagttctgaaaaacactttttgttgaatctgcaagtggacattcggatagatttcaagatttcgttggaaacgggaatatcttcatatcaaatctagacagaagcattctcagaaacgtctttgtgatgttggcattcaactcatagagttgaacattccgtttcagagagcagctttgaggcactctttttgtagtatgtgcaagtggatatttggagcgctctgaggcctacggtgaaaaagcaaatatcttcccataaacactagacagaaacattctcagaaactcctttatgacgtaatgcactcacctaacagagaagaaccttccttttgacagagcagttttgatacactctttttgtagagtctgcaagtggatatttggatagctgtgaagatttcgttggaaacgggaatatcttcctataaaatctagacagataagcattctcagaaactgctctgtgatgtctgcattcaagtcacagagttgaacattgcctttcatagagcaggtttgaaacgctctttttgtagtatatggaagtggacgtttcggacggtttgaggcccatggtgataaagggaatatcttcccctacaagctagaaagaagcattctgtgaaacttgtttgtgatgtgtgtactcaactaacagagttgaacctttcttttcacagagcagttttgaaacactctttttgtagaatctgcgaggggatatttggatagatttcagcatttcgttggaaacgggaatatcttcaaataaaatctcgacagaagcattctcagaaacgtctttgtgatatctgcattcaagtcacagagttgaatattccctttcacagagtaggtttgaaacactctttttgtagtatctggaagtggacatttggagcgccttgacgcctacgatgaaaagggaaatatcttcccataaaaactagacagacaagcaatctccgaatcttctttgggatatatgcacgcagctaacagagttgaacctttctattgacagagcagttttgaaacagtctttctgtggaatctgcaagtggatatttggatagcttggaggatttcgttggaaaagggattatgtataaaaagtagacagcagcatcctcagaaacttccttgtgatgtgtgcattcaagacacacagttgaacattccctttcgtacagcagttttgaaacactctttctgtagtatctggaagtgaacattaggagagctttgaggtctatagtgagaaaaggtatatcttcaaataaaaactagacagaagcattctcataaacttgtttgtgatgtgtgaactcagctaacagagttggatctttcttttgatagagcagttctgaaaaacactttttgttgaatctgcaagtggacatttgtatagatttgaagatttcgttggaaacgggaatatcttcatatcaaatctagacagaagcattctcagaaacgtctttgtgatgtttgcattcaactcatagagttgaacattccctttcagagagcagctttgaagcactctttttgtagtatgtgcaagtggatacttggagcgctctgaggcctacggtgaaaaagcaaatatcttcccataaccactagacagaaacattctcagaaactcctttatgacgtatgtactcaactaacagagaagaaccttccttttgacagagcagttttgatacactctttttgtagaatctacaagtggatatttggatagctgtgaagatttcgttggaaacgggaatatcttcctataaaatctagacagaagcattctcagaaactgctctgtgatgtctgcattcaagtcacagagttgaacattgcctttcctagagcaggtttgaaacgctctttttgtagtatatagaagtggacgtttcggacggtttgaggcccatggtgataaagggaatatcttcccctacaagctagaaagaagcattctgtgaaacttgtttgtgatgtgtgtactcaactaacagagttgaacctttctttttacagagcagttttgaaacactctttttgtagaatctgcgaggggatatttggatagatttcaggattttgttggaaaccggaatatctttatataaaatctcgacagaagcattctcagaagcttctttgtgatatgtgcattcaagtcacagagttgaatattccctttcacagagtaggtttgaaacactctttttctagtatctggaagtggacatttggagcgccttgacacctacggtgaaaagggaaatatcttctcataaaaagtagacagaagcaatctgagaatcttctttgggatatatgcacgcagctaacagagttgaacctttctattgacagagcagttttgaaacagtctttctgtggaatctgcaagtggatatttggatagcttggaggatttcgttggaaacgggattacctatacaaagtagccagcagcatcctcagaaacttctttgtgatgtgtgcattcaagtcacagagttgaacattccctttcgtacagcagttttgaaacactctttctgtagtatctggaagtgaatattaggacagctttcaggtctatggtgataaaggaaatatcttcaaataaaaactagacagaagcattctcataaacttgtttgtgatgtgtgaactcagctaacagacgtggatctttcttttgatacagcagttttgaaaaacactttttgttgaatctgcaagtggacattggatagatatgaagatttcattggaaacgggaatatcttcatatcaaatctatacagaagcattctcagaaacgtctttgcgatgtttgcattcaactcatagagttgaacattccgtttcagagagcagctttcaggcactctttttgtagtatgtgcaagtggatatttggagcgctctgaggcctacggtgaaaaagcaaatatcttcccataaccactagacagaaacattctcagaaacttctttctgacgtatgtactcaactaacagagaagaacctaccttttgacagagcatttttgatacactctttttgtagaatctgcaagtggatatttggatagctctgaagatttctttggaaacgggaatatcttcatatcaaatctagacagaagcattctcagaaactgctctgtgatgtctgcattcaagtcacagagttgaagattgcctttcatagagcaggtttgaaatgctctttttgtagtatatggaagtggacgtttcagacggtttgaggcccatggtgataaagggaatatcttcccctacaagctagaaagaagcattctgtgaaacttgtttttgatgtgtgtactcaactaacagagttgaacctttctttttacagagcagttttgaaacactctttttgtagaatctgcgaggggatatttggatagatttcaggatttcgttggaaacgggaatatcttaatataaaatctcgacagaagcattctcagaaacttctttgtgatatgtgcattcaagtcacagagttgaatattccctttcacagagtaggtttgaaacactctctttgtagtatctggaagtggacatttggagcgccttgacacctacggtgaaaagggaaatatcttcccataaaaactagacagaagcaatctcagaatcttctttgggatatatgcacgcagctaacagagttcaaccttcctattgacagagcagttttgaaacagtctttctgtggaatctgcaagtggatatttggatggattggaggatttcgttggaaacgggattacgtataaaaagtagacagcagcatcctcagaaacttctttgtgatgtctgcattcaagtcacagagttgaacattccctttcgtacagcagttttgaaacactctttctgtagtatctggaagtgaacattaggacagctttcaggtctatggtgagaaaggaaatatcttcaaataaaaactagacagaagcattctcataaacttgttcgtgatgtgtgaactcagctaacacacggtggatctttcttttgatagagcagttctgaaaaacactttttgttgaatctgcaagaggacagttggatagatttgaaggtttcgttggaaacgggaatatcttcatatcaaatctagacagaagcattctcagaaacgtctttgtgatgtttgcattcaactcatagagttgaacattcccttccagagagcagctttgaagcactctttttgtagcatgtgcaagtggacatttggagcgccctgaggcctacggggaaaaagcaaatatcttcccataaccactagacagaaacattctcagaaactcctttatgacgtatgcactcacctaacagagaagaaccttccttttgacagagcagttttgatacactctttttgtagaatctgcaagtggatatttggatagctgtgaagatttcgttggaaacgggaatagcttcctataaaatctagacagaagcattctcagaaactgctctgtgatgtctgcattcaagtcacagagttgaacattgcctttcatagagcagttttgaaacgctctttttgtagtatatggaagtggacgtttcggacggtttgaggcccatggtgataaagggaatatcttcccctacaagctagaaagaagcattctgtgaaacttgtttgtgatgtgtgtactcaactaacagagttgaacctttctttttacagagcagttttgaaacattctttttgtagaatctgcgagggtatatttggattgatttcaggatttcgttggaaacgggaatatcttcatataaaatctcgacagaagcattctcagaaacttctttgtgatatgtgcattcaagtcacagggttgaatattccctttcacagagtaggtttgaaacactctttttgtagtatctggaagtggacatttggagcgccttgacacctatggtgaaaagggaaatatcttcccataaaaactagacagaagcaatctcagaatcttctttgggatatatgcacgcagctaacagagttgaacctatctattgacagagcagttttgaaacagtctttctgtggaatctgcaagtggatatttggatagcttggaggatttcgttggaaacgggattaagtataaaaagtagacagcagcatcctcagaaacttctttgtgatgtgtgcattcaagtcacagagttgaacattccctttcgtacagcagttttgaaacactctttctgtagtaactggaaatgaacattaggacagctttcaggtctatggtgagaaaggaaatatcttcaaataaaaactagacagaagcattctcataaacttgtttgtgatgtgtgaactcagcttacagaggtggatctttcttttgatagagcagttctgaaaaacactttttgttgaatctgcaagtggacatttggatagatttgaagatttcgttggaaacgggaatatcttcatattaaatctagacagaagcattctcagaaacgtctttgtgatgtttgcattcaactcatagagttgaacattccctttcagagagcagatttgaagcactctttttgtagcatgtgcaagtggacatttggagcgccctgaggcctacggggaaaaagcaaatatcttcccataaccactagacagaaacattctcagaaactcctttatgacgtatgcactcacctaacagagaagaaccttccttttgacagagcagttttgatacactccttttgtagaatctgcaagtggatattttgatagctgtgaagatttcgttggaaacgggaatatcttcctataaaacctagacagaagcattctcagcaaactgctctgtgatgtctgcattcaagtcacagagttgaacattgcctttcatagagcaggtttgaaacgctctttttgtactatatggaagaggacgtttcggacggtttgaggcccatggtgataaagggaatatcttcccctacaagctagaaagaagcattgtgtgaaacttgtttgtgatgtttgtactcaactaacagagttgaacctttctttttacagagcagttttgaaacactctttttgtagaatctgcgaggggatatttggatacatttcaggatttcgttggaaacgggaatatcttcatataaaatctcgacagaagcattctcagaaacttctttgtgatatctgcctttaagtcacagagttgaatattccctttcacagagtaggtttgaaacactctttttgtagtatctggaagtgggcatttggagcgccttgacacctacggtgaaaagggaaatatcttcccataaaaactagacagaagcaatctcagaatcttctttgggatatatgcaggcagctaacagagttgaacctttctattgacagagcagttttgaaacagtctttctgtggaatctgcaagtggatatttggatagcttggaggatttcgttggaaacgggattacgtataaaaagtagacaccagcatcctcagtaaacttctttgtgatgtgtgcattcaagtcacagagttgaacattccctttcgtacagcagttttgaaacactctttctatagtatctggaagtgaacattaggacagctttcagctctatggtgagaaaggaaatatcttcaaataaaaactagacagaagcattctcataaacttgtttgtgatgtgtgaactcagctaacagacgtggatctttcttttgatagagcagttctgaaaaacacgttttgttgaatctgcaagtggacatttggatagatttgaagatttcgttggaaacgggaatatcgtcatatcaaatctagacagaagcattctcagaaacgtctttgtgatgtttgcattcaactcatagagttgaacattccgtttcagagagcagctttgaagcactctttttgtagtatgtgcaaggggatatttggagcgctctgaggcctacggtgaaaaagcaaatatcttcccataaccactagacagaaacattctcagaaactcctttatgacgtatgcactcacctaacagagaagaaccttccttttgacagagcacttttgatacactctttttgtagaatctgaaagtggatatttggatagctgtgaagatttctttggaaacgggaatatcttcctataaaatctagacagaagcattctcagaaactgctctgtgatgtctgcattcaagtcacagagttgaacattgccgttcatagagcaggtttgaaacactctttttgtagtatatggaagtggacgtttcggacggtttgaggcccatggtcataaagggaatatcttcccctacaagctagaaagaagcattctctgaaacttgtttgtgatgtgtgtactcaagtaacagagttgaacctttctttttacagagcagttttgaaacactctttttgtagaatctgcgaggggatatttggatagatttcagcatttcgttggaaacgggaatatcttcatataaaatctcgacagaagcattctcagaaacttctttgtgatatctgccttcaagtcacagagttgaatattccctttcacagagtaggtttgaaacactctttttgtagtatctggaagtggacatttggagcgcctttacgcctacggtgaaaagggaaatatcttcccataaaaactagacaaaagcaatctcagaatcttctttgggatatatgcacgcagctaacagagttgaacctttctattgacagagcagttttgaaacagtctttctgtggaatctgcaagtggatatttggatagattggaggatttcgttggaaacgggattaccgtataaaaagtagacagcagcatcctcagaaaacttctttgtgatgtgtgcattcaagtcacagagttgaacattccctttcgtacagcagttttgaaacactctttctgtagtatctggaagtgaacattaggacagctttcaggtctatggtgagaaaggaaacatcttcaaataaaaactagacagaagcattctcataaacttgtttgtgatgtgtgaactcagctaacagaggtggatctttcttttgatagagcagttctgaaaaacaatttttgttgaatctgcaagtggacatttggatagatttgaagatttcgttggaaacgggaatatcttcatatcaaatctagacagaagcattctcataaacgtctttgtgatgtttgcattcaactcctagagttgaacattccgtttcagagagcagctttgaagcactctttttgtagtatgtgcaagtggatatttggagcgctctgaggcctacggtgaaaaagcaaatatcttcccataaccactagacagaaacattctcagaaactcctttatgacgtatgcattcacctaacagagaagaaccttccttttgactgagcacttttgatacactctttttgcagaatctgcaagtggatatttggatagctgtgaagatttcgttggaaacgggaatatcttcctataaaatctagacagaagcattctcagaaactgctctgtgatgtctgcattcaagtcacagagttgaacattgcctttcatagagcaggtttgaaacgctctttttgtagtatatggaaatagacgtttcggacggtttgaggcccatggtgataaagggaatatcttcccctacaagctagaaagaagcattctgtgaaacttgtttgtgatgtgtgtactcaactaagagagttgaacctttctttttacagagcagttttgaaacactctttttgtagaatctgcgaggggatatttggatagatttcaggatttcgttggaaacgggaatatcttcatataaaatctcgacagaagcattctcagaaacttctttgtgatatctgcattcaagtcacagagttgaatattccctttcacagagtaggtttgaaacactctttttgtagtatctgtaagtggacatttggagcgccttgacgcctatggtgaaaagggaaatatcttctcataaaaagtagacacaagcaatctcagaatcttctttgggatatatgcaggcagctaacagagttgaacctttctattgacagagcagttttgaaacagtctttctgtggaatctgcaagtggatatttggatagcttggaggatttcgttggaaacgggattacgtataaaaagtagacagcagcatcctcagaaacttctttgtgatgtgtccattcaagtcacagagttgaacattccctttcgtacagcagttttgaaacactctttctgtagtatctggaagtgaacattaggacagctttcagctctatggtgagaaaggaaatatcttcaaataaaaactagacagaaagcattctcataaacttgtttgtgatgtgtgaactccgctaacataggtggatctttcttttgatagagcagttctgaaaaacactttttgttgaatctgcaagtggacatttggatagatttgaagatttcgttggaaacgggaatatcttcatatcaaatctagacagaagcattctcagaaacgtctttgtgatgtttgcattcaactcatagagttgaacataccctttcagagagcagctttgaagcactctttttgtagtatgtgcaagtggatatttggagcgctctgaggcctacggtgaaaaagcaaatatcttcccataaccactagacagaaacattctcagaaactcctttatgacgtatgcactcacctaacagagaagaaccttccttttgacagagcagttttgatacactctttttgtagaatctgcaagtggatatttgaatagctgtgaagatttcgttggaaacgggaatatcttcctataaaatctagacagaagcattctcagaaactgctctgtgatgtctgcattcaaggtcacagagttgaacattgccgttcatagagcaggtttgaaacactctttttgtagtatatggaagtggacgtttcggacggtttgaggcccatggtgataaagggaatatcttcccctacaagctagaaagaagcattctgtgaaacttgtttgtgatgtgtgtactcaactaacagagttgaacctttctttttacagagcagttttgaaacactctttttgtagaatctacgaggggatatttggatagatttcaggatttcgttggaaacgggaatatcttcatataaaatctcgacagaagcattctcagaaacttccttgtgatatgtgcattcaagtcacagcgttgaatattccctttcacagagtaggtttgaaacactctttttgtagtatctggaagtggacatttggagcgccttgacgcccacggtgaaaagggaaatatcttcccataaaaactagacagaaggaatctcagaatcttctttgggatatatgcacgcagctaacagatttgaacctttctattgacagagcagttttgaaacagtctttctgtggaatctgcaagtggatatttggatagcttggaggatttcgttggaaacgggattacgtataaaaagtagacagcagcatcctcagaaacttctttgtgatgtgtgcattcaagtcacagagttgaacattccctttcgtacagcagttttgaaacactctttctgtagtatctggaagtgaacattaggacagctttcagctctatggtgagaaaggaaatatcttcaaatgaaaactagacagaagaattctcataaacttgtttgtgatgtgtgaactcagctaagagaggtggatctttcttttgatagagcagttctgaaaaacactttttgttgaatctgcaagtggacatttggatagatttgaagatttcgttggaaacgggaatatcttcatatcaaatctagacagaagcattctcagaaacgtctttgtgatgtttgcattcaactcatagagttgaacattccctttcagagagcagctttgaagcactctttttgtagtatgtgcaagggggtatttggagagctctgaggcctaaggtgaaaaagcaaatatcttcccataaccactagacagaaacattctcagaaactcctttatgacgtatgcactcacctaacagagaagaaccttccttttgacagagcagttttgatacactctttttgtagaatctgaaagtggatatttggatagctgtgaagatttcgttggaaacgggaatatcctcctataaaatctagacagaagcattctcagaaactgctctgtgatgtctgcattcaagtcacagagttgaacattgcttttcgtagagcaggtttgaaacgctctttttgtagtatatggaagtagacgtttcggacggtttgaggcccatggtgataaagggaatatcttcccctacaagctagaaagaagcattctgtgaaacttgtttgtgatgtgtgtactcaactaacagtgttgaacctttctttatacagagcagttttgaaacactctttttgtagaatctgcgaggggatatttggatagatttcaggatttcgttggaaactggaatatcttcatataaaatctcgacagaagcattttcagaaacttctttgtgatatgtgcattcaagtcacagagttgaatattccctttcacagagtaggtttgaaacactctttttgtagtatctggaagtggacatttggagcgccttgacgcctatggtgaaaagggaaatatcttcccataaaaactagacagaagcaatctcagaatcttctttgggatatatgtacgcagctaatagagttgaacctttctattgacagagcagttttgaaacagtctttctgtggaatctgctagtggatatttggatagcttggaggatttcgttggaaacgggattacgtataaaaagtagacagcagcatcctcagaaacttctttgtgatgtgtgcattcaagtcacagagttgaacattccctttcctacagcagttttgaaacactctttctgtagtatctggaagtgaacattaggacagctttcaggtctatggtgagaaaggaaatatcttcaaataaaaactagacagaagcattctcataaacttctttgtgatgtgtgaactcagctaacagacgtggatctttcttttgatacagcagttttgaaaaacactttttgttgaatctgcaagtggacatttggatagatttgaagatttcgttggaaacgggaatatcttcatatcaaatctagacagaagcattctcagaaacgtctttgtgatgtttgcattcaactcatagagttgaacattcccttccagagagtagctttgaagcactctttttgtagcatgtgcaagtggacatttggagcgccctgaggcctacggggaaaaagcaaatatcttcccataaccacttgacagaaacattctcagaaactcctttatgacgtatgtgctcaactaacagagaagaaccttccttttgacagagcagttttgatacactctttttgtagaatctgcaagtggatatttggatagctgtgaagatttcgttggaaacgggaatatcttcctataaaatctagacagaagcattctcagaaactgctctgtgatgtctgcattcaagtcacagagttgaacattgcctttcctagaacaggtttgaaaagctctttttgtagtacatggaagtggacgtttcggacggtttgaggcccatggtgataaagggaatatcttcccctacaagctagaaagaagcattctgtgaaacttgtttgtgatgtgtgtactcaactaacagagttgaacctttctttttacagagcagttttgaaacactctttttgtagaatctgcgaggggatatttggatagatttcaggatttcgttggaaacgggaatatcttcatataaaatctcgacagcagcattctcagaaacttctttgtgatatgtgcattcaagttacagagttgaatattccctttcacagagtaagtttgaaaccctcttttagtagtatctggaagtggacatttggagcgccttgacgcctacggtgaaaagggaaatatcttcccataaaaactagacagaagcaatctcagaatcttctttgggatatatgcacgcagctaacagagttgaacctttctattgacagagcagttttgaaacagtctttctgtggaatctgcaagtggatatttgattagcttggaggatttcgttggaaacgggattaagtataaaaagtagacagcagcatcctcagaaacttctttgtgatgtgtgcattcaagtcacagagttgaatattccctttcgtacagcagttttgaaacactctttctgtagtatctggaagtgaaaactaggacagctttcaggtctatggtgagaaaggaaatatcttcaaataaaaactagacagaaagcattctcataaacttgtttctgatgtgtgaactcagctaacagacgtggatctttcttttgatacagcagttttgaaaaacactttttgttgaatctgcaagtggacatttggatagatttgaagatttcgttggaaacgggaatatcttcatatcaaatctagacagaagcattctcagaaacgtctttgtgatgtttgcattcaacccatagagttgaacattccgtttcagagagcagctttgaggcactctttttgtagtatgtgcaagtggatatttggtgcgctgtgaggcctacggtgaaaaagaaaatatcttcccaaaaccactagacaaaaacattctcagaaactcctttatgacgtatgcactcacctaacagagaagaaccttccttttgacagagcagttttgatacactctttttgtagaatctgcaagtggatatttggatagctgtgaagatttcgttggaaacgggaatatcttcctataaaatctagacggaagcattctcagaaactgctctgtgatgtctgcattcaagtcacagagttgaacattgcctttcatagagcaggtttgaaacgctctttttgtagtatatggaagtggacgtttcggacggttggaggcccacggtgataaagggaatatcttcccctacaagctagaaagaagcattgtgtgaaacttgtttgtgatgtgtgttctcaactaacagagttgaacctttctttttacagagcagttttgaaacactctttttgtagaatctgcgaggggatatttggatacatttcaggatttcgttggaaacgggaatatcttcatataaaatctcgacagaagcattctcagaaacttcccttgtgatatgtgcattcaagtcacagagttgaatattccctttcacagagtaggtttgaaacactctttttgtagtatctggaagtggacatttggagcgccttgacacctacggtgaaaagggaaaaatcttcccataaaaactagacagaagcaatctcacaatcttctttgggatatatgcacgcagctaacagagttgaacctttctattgacagagcagttttgaaacagtctttctgtggaatctgcaagtggatatttggatagcttggaggatttcgttggaaacgggattacgtataaaaattagacagcagcatcctcagaaacttctttgagatgtgtgcattcaagtcacagagttgaacattccctttcgtacagcagttttaaaacactctttctgtagtaactggaagtgaacattaggacagctttcaggtctatggtgagaaaggaaatatcttcaaataaaaactagacagaagcattctcataaacttgtttgtgatgtgtgaactcagctaacagaggtggatctttcttttgatagagcacttctgaaaaacactttttgttgaatctgcaagtggacatttggatagatttgaagatttcgttggaaacgggaatatcttcatatcaagtctagacagaagcattctcagaaacgtctttgtgatgtttgcattcaactcatagagttgaacattcccttccagagagcagctttgaagcactctttttgtagcatgtgcaagtggacatttggagtgccctgaggcctacggggaaaaagcaaatatcttcccgtaaccactagacagaaacattctcagaaactcctttatgacgtatgcactcacctaacagaaaagaaccttccttttgacagagcagttttgatacactctttttgtagaatctgcaagtggatatttggatagctgtgaagatttcgttggaaacgggaatatcttcctataaagtctagacagaagcattctcagaaactgctctgtgatgtctgcattcaagtcacagagttgaacattgcctttcatagagcaggtttgaaacgctctttttgtagtatatggaagtggacgtttcggacggtttgaggaccatggtgataaagggaatatcttcccctacaagctagaaagaagcattctgtgaaacttgtttgtgatgtgtgtgctcaactaacagagttgaacctttctttttacagagcagttttgaaacactctttctgtagaatctgcgaggggatatttggatagatttcaggatttcgttggaaacgggaatatcttcatataaaatctcgacagaagcattctaagaagcttctttgtgatatgtgcattcaagtcacagagttgaatattccctttcacagagtaggtttgaaacactctttttgtagtatctggaagtggacatttggagcgccttgacgcctacggtgaaaagggaaatatcttctcataaaaagtagacagaagcaatctcagaatcttctttgggatatatgcacgcagctaacagagttgaacctttctattgacagagcagttttgaaacagtctttctgtggaatctgcaagtggatatttggatagcttggagcatttcattggaaacgggattacgtataaaaagtagacagcagcatcctcagaaacttctttgtgatgtgtgcattcaagtcacagagttgaacactccctttcgtacagcagttttgaaacactctttctgtagtatctggaagtgaacattaggacagctttcagctctatggtgagaaaggaaatatcttcaaataaaaactagacagaagcattctcataaacttgtttgtgatgtgtgaactcagctaacagaggtggatctttcttttgatagagcagttctgaaaaacacgttttgttaaatctgcaagtggacatttggatagatttgaagatgtcgttggaaacgggaatatcttcatatcaaatctagacagaagcattctcagaaacaccttcgtgatgtttgcaatcaagtcacagagttgaaccttccgtttcatagagcaggttggaaacactcttattgtagcatgtgcaagtggacatttggagcgccctgaggcctacggggaaaaagcaaatatcttcccataaccactagacagaaacattctcagaaactcctttatgacgtatgtactcaactaacagagaagaaccttccttttgacagagcagttttgatacacactttttgtagaatctgcaagtgcatatttggatagctgtgaagatttcgttggaaacgggaatatcttcctataaaatctagacagaagcattctcagaaactgctctgtgatgtctgcattcaagtcacagagttgaacattgcctttcatagagcaggtttgaaatgatctttttctagtatatggaagtggacgtttcagacggtttgaggcccatggtgataaagggaatatcttcccctacaagctagaaagaagcattctgtgaaacttgtttgtgatgtgtgtactcaactgacagagttgaacctttctttttacagagcagttttgaaacactctttttgtagaatctgcgaggggatatttggatagatttcaggatttcgttggaaacgggaatatcttcatataaaatctcgacagaagcattctcagaaacttctttgtgatatgtgcattcaagtcaaagagttgaatattccctttcacagagtaggtttgaaacactctttttgtagtatctggaagtggacatttggagcgccttgacgcctacggtgaaaagggaaatatcttcccataaaaactagacagaagcaatctcagaattttctttgggatatatgcacatagctaatagagttgaacctttctattgacagagcagttttgaaacagtctttctgtggaatctgcaagtggatatttggatagcttggaggatttcgttggaaacgggattacgtataaaaagtagacagcagcatcctcagaaacatccttgtgatgtgtgcattcaagtcacagtagttgaacattccctttcgtacagcagttttgaaacactctttctgtagtatctggaagtgaactttaggacagctttcaggtctatagtgagaaaggatatatcttcaaataaaaactagacagaagcatcctcagaaacttctttgtgatgtgtgcattcaagtcacagtagttgaacattccctttcgtacagcagttttgaaacactctttctgtagtatctggaagtgaacattaggacagctttcaggtctatggtgagaaaggaaatatcttcaaataaaaactacacagaagcattctcagaaacgtctttgtgatgtttgcattcaactcatagagttgaacattccctttcagagagcagctttgaagcactctttttgtagcatgtgcaagtggacatttggagcgccctgaggcctacggggaaaaagcaaatatcttcccataaccacaagacagaaacattctcagaaactcctttatgacgtatgcactcacctaacagagaagaaacttccttttgacagagcagttttgatacactctttttgtagaatctgcaagtggatatttggatagctgtgaagatttcgctggaaacgggaatatcttcctataaaatctagacagaagcattctgtgaaacttgtttgtgatgtgtgtactcaactaacagagttgaacctttgtttttacagagcagttttgaaacactctttttgtagaatctgcgaggggatatttggatagatttcaggatttcgttggaaacgggaatatcttcatataaaatctcgacagaagcattctcagaaacttctttgtgatatgtgcattcaagtcacagagttgaatattccctttcacagagtaggtttgaaacactctttttgtagaatctgcgaggggatatttggatagatttcaggatttcgttggaaacgggaatatcttcatataaaatctcgacggaagcattctctgaaacttctttgtgatatgtgcattcaagtcacagagttgaatattccctttcacagagtaggtttgaaacactctttttgtagtatctggaagtggacatttggagcgccttgacgcctacggtgaaaagggaaatatcttcccataaaaactagacagaagcaaactcagaatcttctttgtgatatatgcacgcagctaacagagttgaacctttctattgactgagcagatttgaaacagtctttctgtggaatctgcaagtggatatttggatagattggaggatttcgttggaaacgggattacgtataaaaagtacacagccgcatcctcagaaacatctttgtgatgtgtgcattcaagtcacagagttgaacattccctttcgtacagcagttttgaaacactctttctgtagtatctggaagtgaacattaggacagctttcaggtctatggtgagaaaggaaatatcttcaaataaaaactagacagaagcattctcaaaaacttgtttgtgatgtgtgaactcagctaacagaggtggatctttcttttgatagagcagttctgaaaaacactttttgttgaatctgcaagtggacatttggatagatttgaagatttcgttggaaacgggaatatcttcatatcaaatctagacagaagcattcccagaaacgtctttgtgatgtttgcattcaactcatagggttgaacattccctttcagagagcagctttgaagcactctttttgtagtatgtgcaagtggatatttggagcgctctgaggcctacggtgaaaaagcaaatatcttcccataaccactagacagaaacattctcagaaactcctttatgacgtatgcactcacctaacagagaagaaccttccttttgacagagcagttttgatacactctttttgtagaatctgcaagtggatatttggatagctgtgaaggtttcgttggaaacggaaatatcttcctataaaatctagacagaagcattctcagaaactgctctgtgatgtctgctttcaagtcacagagttgaacattgcctttcatagagcaggtttgaaacgctctttttgtagtatatggaagtggatgtttcggacggttggaggcccatggtgataaagggaatatcttcccctacgagctagaaagaagcattgtgtgaaacttgtttgtgatgtgtgtactcaactaacagagttgaacctttctttttacagagcagttttgaaacactctttttgtagaatctgcgaggggatatttggatacatttcgggatttcgttggaaacgggaatatcttcatataaaatctcgacagaagcattctcagaaactttccttgtgatatgtgcattcaagtcacagagttgaatattccctttcacagagtaggtttgaaacactctttttgtagtatctggaagtggacatttggagcgccttgacgcctacggtgaaaagggaaatatcttcccatcaaaactagacagaagcaatctcagaatcttctttgggatatatgcacgcagctaacagagttgaacctttctattgacagagcagttttgaaacagtctttctgtggaatctgcaagtggatatttggatagcttggaggatttcgttggaaacgggattacgtatcaaatgtagacagcagcatcctcagtaaacatccttgtgatgtgtgcattcaagtcacagagttgaacattccctttcgtacagcagttttgaaacactctttctgtagtatctggaagtgaactttaggacagctttcaggtctatagtgagaaaggatatatcttcaaataaaaactagacagaagcattctcataaacttgtttgtgatgtgtgaactcagctaggagacgtggatctttcttttgatagagcagttctgaaaaacacgttttgttgaatctgcaagtggacatttggatagatttgaagatttcgttggaaacgggaatatcttcatatcaaatctagacagaagcattctcagaaacgtctttgtgatgtttgcattcaactcatagagttgaacattccgtttcagagagcaggtttgaagcactctttttgtagtatgtgcaagtggatatttggagcgctctgaggcctacggtgaaaaagcaaatatcttcccataatcactagacagaaacattctcagaaactcctttatgacgtatgcactcacctaacagagaagaaccttccttttgacagagcagttttgatacactctttttgtagaatctgcaagtggatatttgggatagctgtgaagatttcgttggaaacgggcatatcttcctataaaatctagacagaagcattctcagaaactgctctgtgatgtctgcattcaagtaacagagttgaacattgcctttcatagagcaggtttgaaacgctctttttgtagtatatggaagtggacttttcggacggtttgaggcccatggtgataaagggaatatcttcccctacaagctagaaagaagcattgtgtgaaacttgtttgtgatgtgtgtactcaactgacagatttgaacctttctttttacagagcagttttgaaacactctttttgtagaatctgcgaggggatatttggatagatttcaggatttcgttggaaacgggaatatcttcatataaaatctcgacagatgcattctcagaaacttctttgtgatatgtgcattctagtcacagagttgaatattccctttcacagagtaggtttgaaacactctttttgtagtatctggaagtggacatttggagcgccttgacgcctacggtgaaaagggaaatatcttcccatgaaaactagacagaagcaatctcagaatcttctttgggatatatgcacgcagctaacagagttgaacctttctattgacagagcagttttgaaacagtctttctgtggaatctgcaagtggatatttggatagcttggaggatttcgttggaaacgggattacgtataaaaattagacagcagcatcctcagaaacttccttgtaatgtgtgcattcaagtcacagagttgaacattccctttcctacagcagttttgaaacactctttctgaagtatctggaagtgaactttaggagagctttcatgtctatagtgagaaaggctatatcttcaaataaaaaatagacagaagcatttttaaaaacttgtttgtgatgtgtgaactcaactaacagaggtggatctttctttcgatacagcagttttgaaaaacactttttgttgaatctgcaagtggacatttggatagattggaagatttctttggaaacgggaatatcttcatatcaaatctagacagaagcattctcagcaaacgtctttgtgatgtttgcattcaacccatagagttgaacattccctttcagagagcagctttgaagcactctttttgtagtatgtgcaaggggatatttggagcgctctgaggcctaaggtgaaaaagcaaatatcttcccataaccactagacagaaacattctcagaaactcctttatgacgtatgcactcacctaacagagaagaaccttccttttgacagagcagttttgatacactctttttgtagaatctgcaagtggatatttggatagctgtgaagatttcgttggaaacgggaataacttcctataaaatgtagacagaagcattctcagaaactgctctgtgatgtctgcattcaagtcacagagttgaacattgcctttcatagagcaggtttgaaacgctctttttgtagtatatggaagtggacgtttcggacggtttgaggcccatggtgataaagggaatatcttcccctacaagctagaaggaagcattctgtgaaacttgtttgtgatgtgtgtactcagctaatagagttgaacctttctttatacagagcagttttgaaacactctttttgtagaatctgcgaggggatatttggatagatttcaggatttcgttggaaacgggaatatcttcatataaaatctcgacagaagcattctcagaaacttctttgtgatatctgcattcaagtcacagagttgaatattccctttcacagagtaggtttgaaacactctttttgtagtatttggatgtggacattttgagcgccttgacgcctacggtgaaaaaggaaatatcttcccataaaaactagacagaagcaatctccgaatcttctttgggatgtatgcacgcagctaacagagttgaacctttctattgacagagcagttttgaaacagtctttctgtggaatctgcaagtggatatttggatagcttggaggatttcgttggaaacgggattacgtataaaaagtagacagcagcattctcagaaacatctttgtgatgtgtgcattcaagtcaaagtgttgaacattccctttcgtacagcaggtttgaaacactctttctgtagtatctggaagtgaacgggacgagagctttcaggcctatagtgagaaaggagatatcttcaaataaaaactagacagaagcattctcataaacttgtttgtgatgtgtgaactcagctaacagaggtggatctttcttttgatagagcagttctgaaaaacactttttgttgaatctgcaagtggacattttgatagatatgaagatttcgttggaaacgggaatatcttcatatcaaatctagacagaagcattctcagaaacgtctttgtgatgtttgcattgaactcatagagttgaacattccgtttcagagaccagctttgaagcactctttttgtagtatgtgcaagtggatatttggagcgctctgaggcctacggtgaaaaagcaaatatcttcccataaccactagacagaaacattctcagaaactcctttatgacgtatgtactcaactaacagagaagaaccttccttttgacagagcagttttgataaactcattttgtagaatctgcaagtggatatttggatagctgtgaagatttcgctggaaacgggagtatcttcctataaaatctagacagaagcattctcagaaactgctctgtgatgtctgcattcaagtcacagagttgaacattgcctttcatagagcaggtttgaaatgctctttttgtagtatatggaagttgacgtttcggacggtttgaggcccatggtgataaagggaatatcttcccctacaagctagaaagaagcattctgtgaaacttgtttgtgatgtgtgtactcaactaacagagttgaacctttcttttcacagagcagttttgaaacactctttttgtagaatctgcgaggggatatttggatagatttcaggatttcgttgggaacgggaatatcttcatataaaatctcgacagaagcattctcagaaacttccttgtgatatgtgcattcaagtcacagtgttgaatattccctttcacagagtaggtttgaaacactctttttgtagtatctggaagtggacatttggagcgccttgacgcctacggtgaaaagggaaatatcttcccataaaaactagacagaagcaatctcagaatcttctttgggatatatgtacgcagctaatagagttgaacctttctattgacagagcagttttgaaacagtctttctgtggaatctgcaagtggatatttggataccttggaggatttcgttggaaacgggattacgtataaaaagtagacagcagcatcctcagaaacttctttgtgatgtgtgcattcaagtcacagagttgaacattccctttcgtacagcagttttgaaacactctttctgtagtatctggaagtgaacattaggacaactttcagctctatggtgagaaaggaaatatcttcaaataaaaactagacagaagcattctcataaacttgtttgtgatgtgtgaactcagctaacggaggtggatctttcttttgatagagcagttctgaaaaacactttttgttgaatctgcaagtggacatttggatagatttgaagatttcgttggaaacgggaatatcttcatatcaaatctagacagaagcttctcagaaacgtctttgtgatgtttgcattcaactcatagagttgaacattccctttcagagagcagctttgaagcactgtttttgtagtatgtgcaagtggatatttggagcgctctgaggcctaaggtgaaaaagcaaatatcttcccataaccactagacagaaacattctcagaaactcctttatgacgtatgcactcacctaacagagaagaaccttcctttagacagagcagttttgatacactctttttgtagaatctgcaagtggatatttggatagctgtgaagatttcgttggaaacgggaatatcttcctataaaatctagacagaagcattctcagaaactgctctgtgatgtctgcattcaagttacagagttgaacattgcctttcatagagcaggtttgaaacgctctttttgtagtatatggaagtggacgtttcggacggtttgaggcccatggtgataaagggaatatcttcccctacaagctagaaagaagcattctgtgaaacttgtttgtgatgtgtgtactcaactaacagagttgaacctttctttttacagagcagttttgaaacactctttttgtagaatctgcgaggggatatttggatagatttcaggatttcgttggaaacgggaatatcttcatataaaatctcgacagaagcattctcagaaactactttgtgatatctgcattcaagtcacagagttgaatattccctttcacagagtaggtttgaaacactctttttgtagtatctggaagtggacatttggagcgccttgacacctacggtgaaaaagggaaatatcttcccataaaaactagacagaaggaatctcagaatcttctttgggatatatgcacgcagctaacagagttgaacctttctattgatagagcagtttagaaacagtctttctgtggaatctgcaagtggatatttggatagcttggaggatttcgttggaaacgggattacgtataaaaagtagacagcagcatcctcagaaacttctttgtgatgtgtgcattcaagtcacagagttgaacattccctttcgtacagcagttttgaaacactctttctgtagtatccggaagtgaacattaggacagctttcagctctatggtgagaaaggaaatatcttcaaataaaaactagacagaagcattctcataaacttgtttgtgatgtgagaactcagctaacagaggtggatctttcttttgatagagcagttctgaaaaacactttttgttgaatctgcaagtggacatttggatagatttgaagatttcgttggaaacgggaatatcttcatatcaaatctagacagaagcattctcagaaacgtctttgtgatgtttgcattcaactcatagagttgaacattccgtttcagagagcagctttgaagcactctttttgtagtatgtgcaagtggatatttggtgcgctctgaggcctacggtgaaaaagcaaatatcttcccataaccactagacagaaacattctcagaaactcctttatgacgtatgcactcacctaacagagaagaaccttccttttgacagagcagttttgatacactctttttgtagaatctgcaagtggatatttgaatagcattgaagatttcgttggaaacgggaatatcttcgtataaaatctagacagcagcattctgagaaactgctctgtgatgtctgcattcaagtcacagagttgaacattgcctttcatagagcaggtttgaaacgctctttttgtagtatatggaagtggacgtttcggacggtttgaggcccatggtgataaagggaatatcttcccctacaagctagaaagaagcattctgtgaaacttgtttgtgatgtgtgtactcaactaacagagttgaacctttctttttacagagcagttttgaaacactctttttgtagaatctgcgaggggatatttggatacatttcagcattttgttggaaacgggaatatcttcatataaaatctcgacagaagcattctcagaaacttatttgtgatatctgcattcaagtcacagagttgaatattccctttcacagagtaggtttgaaacactctttgtagtatctggaagtggacatttggagcgccttgacgcctacggtgaaaagggaaatatcttcccataaaaacaagacagaagcaatctcagaatcttctttgggatatatgcacgcagctaacagagttgaacctttctattgacagagcagttttgaaacagtctttctgtggaatctgcaagtggatatttggatagattggaggatttcgttggaaaggggattacgtatcaaaagtagacagcagcatcctcagaaacttctttgtgatgtgtgcattcaagtcacagagttgaacattccctttcgtacagcagttttgaaacactctttctgtagcatctggaagtaaacattaggacagctttcaggtctatggtgagaaaggaaatatcttcaaataaaaactagacagaagcattctcataaacttgtttgtgatgtctgaactcagctaacagaggtggatctttcttttgatagagcagttctgaaaaacactttttgttgaatctgcaagtggacatttggatagatttgaagatttcgttggaaacgggaatatcttcatatcaatctagacagaagcattctcagaaacgtctttgtgatgtttgcattcaactcatagagttgaacattccgtttcagagagcaggtttgaagcactctttttgtagtatgtgcaagtggatatttggagcgctctgaggtctacggtgaaaaagcaaatatcttcccataaccactagacagaaacattctcagaaacttctttatgacgtatgtactcaactagcagagaagaactttccttttgacagagcatttttgatacactctttttgtactatctgcaagtggatattgggatagctgtgaagatttcgttggaaacgggaatatcttcctataaagtctggacagaagcattctcagaaactgctctgtgatgtctggattcaagtcacagagttgaacattgcctttcatagagcaggtttcaaacactctttttttagtatatggaagtggatgtttcggacggtttgaggtccatggtgatacagggaatatcttcccctacaagctagaaagaagcattctgtgaaacttgtttgtgatgtgtgtactcaactaacagagttgaacctttctttttacagagcagttttgaaacactctttttgtagaatctgcgaggggatatttggatagatttcaggatttcattggaaacgggaatatcttcatagaaaatctcgacagaagcattctcagaaacttctttgtgatatgtgcattcaagtcacagagttgaatattccctttcacagagtaggtttgaaacactctttttgtagtatctggaagtggacatttggagcgccttgacgcctacggtgaaaagggaaatatcttctcataaaaagtagacagaagcaatctcagaatcttctttgggatatatgcacgcagctaacagagttgaacctttctattgacagagcagttttgaaacagtctttctgtggaatctgcaagtggatatttggatagctttgaggatttcgttggaaacgggattacgtacaaaaagtagacagcagcatcctcagaaacttctttgtgatgtatgcattcaagtcacagagttgaacattccctttcgtacagcagttttgaaacactctttctgtagtatctggaagtgaacattaggacagctttcaggtctatggtgagaaaggaaatatcttcaaataaaaactagacagaagcattctcataaacttgtttgtgatgtgtgaactcagctaagagacgtggatctttcttttgatagagcagttctgaaaaacactttttgttgaatctgcaagtggacatttgggtagatttgaagatttctttggaaacgggaatatcttcatatcaaatctagacagaagcattctcagaaacgtctttgtgatgtttgcattcaactcatagagttgaacattccctttcagagagcagctttgaagcactctttttgtagtatgtgcaagtggatatttggagcgctctgaggcctatagggaaaaagcaaatatcttcccataaccactagacagaaacattctcagaaactcctttatgacgtatgtactcaactaacagagaagaaccttctttttgacagagcagttttgatacactctttttgtagaatctgcaagtggatatttggatagctgtgaagatttcgttggaaacgggaatatcttcctataaaatctagacagaagcattctcagaaactgctctgtgatgtctgcattcaagtcacagagttgaacattgcctttcatagagcaggtttgaaacgctctttttgtagtatatggaagtggatgtttcggacggtttgaggcccatggtgataaagggaatatcttcccctacaagctagaaagaagcattctgtgaaacttgtttgtgatgtgtgtactcaactaacagagttgaacctttctttttacagagcagttttgaaacactctttttgtagaatctgcgaggggatatttggatagatttcaagatttcgttggaaacgggaatatcttcataaaaaatctcgacagaagcattctcagaaacttctttgtgatatgtgcattcaagtcagagagttgaatattccctttcacagagtaggtttgaaacactctttttgtagtatctggaagtggacattttgagcaccttgacgcctacggtgaaaagggaaatatcttctcataaaaagtagacagaagcaatctcagaatcttctttgggatatatgcacgcagctaacagatttgaacctttctattgacagagcagttttgaaacagtctttctgtggaatctgcaagtggatatttggatagcttggaggatttcgttggaaacgggattacgtataaaaagtagacagcagcatcctcagaaacttctttgtgatgtgtgcattcaagtcacagagttgaacattccctttcgtacagcagttttgaaacactctttctgtagtatctgtaagtgaacattaggacagttttcaggtctatggtgagaaaggaaatatcttcaaataaaaactagacagaagcattctcataaacttgtttgtgatgtgtgaactcagctaacagagatggatctttcttttgatagagcagttcggaaaaacactttttgttgaatctgcaagtggacatttggatagatttgaagatttcgttggaaacgggaatatcttcatatcaaatctagacagaagcattctcagaaacgtctttgtgatgtttgcattcaactcatagagttgaacattccgtttcagagagcagctttgaagcactctttttgtagtgtgtgcaagtggatatttggagcgctgtgaggcctacggtgaaaaagcaaatatcttcccataaccactagacagaaacattctcagaaactcttttatgacgtatgcactcacctagcagagaagaaccttccttttgacagagcagttttgatacactccttttgtagaatctgcaagtggatatttggatagctgtgaagatttcgttggaaacgggaatatcttcctataaaatctagacagaagcattctcaagaaactgctctgtgatgtctgcattcaagtcacagagttgaacattgcctttcatagagcaggtttggaatgctctttttgcagtatatggaagtggacgtttcagacggtttgaggcccatggtgataaagggaatatcttcccctacaagctagaaagaagcattctgtgatacttgtttgtgatgtgtgtactcaactaacagagttgaacctttctttttacagagcagtgttgaaacactctttttgtagaatctgcgaggggatatttggatagatttcaggatttcgttggaaacgggaatatcttcatataaaatctcgacggaagcattctcagaaacatctttgtgatatctgcattcaagtcacagagttgaatattccctttcaccaagtaggtttgaaacactctttttgtagtatctggaagtggacattgggagcgccttgacacctacggtgaaaagggaaatatcttcccataaaaactagacagaagcaatctcagaatcttctttgggatatatgcacgcagctaacagagtttaacctttctattgacagagcagttttgaaacagtgtttctgtggaatctgcaagtggatatttggatagattggaggatttcgttggaaacgggattacatataaaaagtagacagcagcatcctcagaaacttctttgtgatgtgtgcattcaagtcacagagttgaacattccctttcgtacagcagttttgaaacactctttctgtagtatctggaagtgaacattaggacagctttcagctctatggtgagaaaggaaatatcttcaaataaaaactggacagaagcattctcataaacttgcttgtgatgtgtgaactcagctaacagaggtggatctttcttttgatagagcagttctgaaaaacactttttgttgaatctgcaagtggacatttggatagatttgaagattttgttggaaacgggaatatcttcatatcaagtctagacagaagcattctcagaaacgtctttgtgatgttagcattcaactcatagagttgaacattccctttcagagagcagctttgaagcactctttttgtagtacgttgaagtggacatttggagcgctttgaggcctacagggaaaaagcaaatatcttcccataaccactagacaggaacattctcagaaacttctttatgacgtatgtactcaactagcagagaagaactttccttttgacagagcatttttgatacactctttttgtactatctgcaagtggatatttggatagctgtgaagatttcgatggaaacgggaatatcttcctataaagtctggacagaagcattctcagaaactgctctgtgatgtctgcattcaagtcacagagttgaacattgcctttcatagagcaggtttcaaacactctttttttagtatatggaagtggacgattcggatggtttgaggatgatggtgataaaggaaatatcttcccctacaagctagaaagaagcattgtgtgaaacttgtttgggatgtgtgtactcaactaacagagttgaacctttctttttacagagcagttttgaaacactctttttgtagaatctgcgaggggatatttggatagatttcaggatttcgttggaaacgggaatatcttcatataaaatctcgacagaagcattctcagaaacttctttgtgatatctgcattcaagtcacagagttgaatattccctttcacagtgtaggtttgaaacactcttttgtagtatctggaagtatacatttggagcgccttgacgcctacggtgaaaagggaaacatcttcccataaaaactagacagaagcaatctcagaatcttctttgggatatatgcacgcagctaacagagttgaacctttctattgacagagcagttttgaaacagtctttctgtggaatctgcaagtggatatttggttagattggaggatttcgttggaaacgggattacgtataaaaagtagacagcagcattctcagaaacttctttgtgatgtgtgcattcaagtcacagagttgaacattccctttcgtacagcagttttgaaacactctttctgtagtatctggaagtgaacattaggacagctttcaggtctatggtgagaaaggaaatatcttcaaataaaaactagacagaaagcattctcataaacttgtttgtgatgtgtgaactcagctaacagaggtggatctttcttttgatagagcagttctgaaaaacactttttgttgaatctgcaagtggacatttggatagatttgaagatttctttggaaacgggaatatcttcatatcaaatctagacagaagcattctcagaaacgtctttgtgatgtttgcattcaactcacagagttgaacattccctttcagagagcagctttgaagcactctttttgtagtatgtgcaaggggatatttggagcgctctgaggcctacggtgaaaaagcaaatatcttcccataaccactagacagaaagattctcagaaactcctttatgacgtatgtactcaactaacagagaagaaccttccttttgacagagcagttttgatacactctttttgtagaatctgcaagtggatatttggatagctgtgaagatttcgttggaaacgggaatatcttcctataaaatctagacagaagcattctcagaaactgctctgtgatgtctgcattcaagtcacagagttgaacattgcctttcatagagcaggtttgaaacgctctttttgtagtatatggaagtggatgtttcggacggttggaggcccatggtgataaagggaatatcttcccctacaagctagaaagtagcattctgtgaaacttgtttgtgatgtgtgtactcaactaacagagttgaacctttctttttacagagcggttttgaaacactctttttgtagaatctgcgaggggatatttggatagatttcaggatttcgttggaaacgggaatatcttcatagaaaatctcgacagaagcattctcagaaacttctttgtgatatctgcattcaagtcacagagttgaatattccctttcacagagtaggtttgaaacactctttttgtagcatctggaagtggacatttggagcgccttgacacctacggtgaaaagggaaatattttcccataaaaactagacagaagcaatctcagaatcttctttgggatatatgcacgcaggtaacagagttgaacctttctattgacagagcagttttgaaacagtctttctgtggaatctgcaagtggatatttggatagcttggaggatttcgttggaaacgggattacgtataaaaagtagaaagcaggatcctcagaaacttctttgtgatgtgtgcattcaagtcacagagttgaacattccctttcgtacagcagttttgaaacactctttctgtagtatctggaagtgaacattacgacagctttcaggtctatggtgagaaaggaaatatcttcaaataaaaactagacagaagcattctcataaacttgtttgtgatgtgtgaactcagctaacagaggtggatctttcttttgatagagcagttctgaaaaacactttttgttgaatctgcaagtgggcatttggatagatttgaagatttcagttggaaacgggaatatcttcatatcaaatctagacagaagcattctcagaaacgtctttgtgatgtttgcattcaactcatagaagttgaacattccgtttcagagagcagctttgaagcactctttttgtagcatgtgcaagtggatatttggagcgctctgaggcctacggtgaaaaagcaaatatcttcccataaccagtagacagaaacattctcagaaactcctttatgacgtgtgcactcacctaacagagaagaaccttccttttgacagagcagttttgatacactctttttgtagaatctgcaagtggatatttggatagctgtgaagatttctttggaaacgggaatatcttcctataaaatctagacagaagcattctcagaaactgctctgtgatgtctgcattcaagtcacagagttgaacattgcctttcatagagaaggtttgaaacgctctttttgtagtatatggatgtggacgtttcggacggtttgaggcccatggtgataaagggaatatcttcccctaccagctagaaagaagcattctgtgaaacttgtttgtgatgtgtgtactcaactaacagagttgaacctttctttttacagagcagttttgaaacactccttttgtagaatctgtgaggggatatttggatagatttcaggatttcgttggaaacgggaatatcttcatataaaatctcgacagaagcattctcagaaacttctttgtgatatgtgcattcaagtcacagagttgaatataccctttcacagagtaggtttgaaacactctttttgtagtatctggaagtggacatttggagcgccttgacgcctacggtgaaaagggaaatatcttcccataaaaactagacagaagcaatctcagaatcttctttgggatatatgcacgcagctaacagagttgaacctttctattgacagaacagttttgaaagagtctttctgtggaatctgcaactggatatttggatagcttggaggatttcgttggaaacgggattacgtataataagtagacagcagcattctcagaaacttctttgtgatgtgtgcattcaagtcacagagttcaacattccctttcgtacagcagttttgaaacactctttctgtagtatctggaagtgaacattaggacagctttcaggtctatggtgagaaaggaaatatcttcaaataaaaactagacagaagcattctcataaacttgtttgtgatgtgtgaactcagctaacagaggtggatctttcttttgatagagcagttctgaaaaacactttctgttgaatctgcaagtggacatttggatagatttgaagatttcgttggaaatgggaatatcttcatatcaaatctagacagaagcattctcggaaacgtctttgtcatgtttgcattcaactcatagagttgaacattccgtttcagagagcagctttgaagcactctttttgtagtatgtgcaaggggatatttggagcgctgtgaggcctacggtgaaaaagcaaatatcttcccataaccactagacagaaacattctcagaaactcctttatgacgtatgtactcaactaacagcgaagaaccttccttttgacagagcagttttgatacactctttttgtagaatctgcaagtggatatttggatagctgtgaagatttcgttggaaacgggaatatcttcctataaaatctagacagaagcattctcagaaactgctgctgtgatgtctgcattcaagtcacagagttgaacattgcctttcatagagcaggtttgaaacgctctttttgtagtatatggaagtggacttatcggacggtttgaggcccatggtgataaagggaatatcttcccctacaagctagaaagaagcattctgtgaaacttgtttgtgatgtgtgtactcaactaacagagttgtacctttctttttacagagcagttttgaaacactctttttgtagaatctgcgaggggataattggatagatttcaggatttcattggaaacgggaatatcttcatataaaatctcgacagaagcattctcagaaacttctttgtgatatgtgcattcaagtcacagagttgaatattccctttcacagaggaggtttgaaacactctttttgtagtatctggaagtggacattcggagcgccttgacgcctacggtgaaaagggaaatatcttcccataaaaactagacagaagcaatctcagaatcttctttgggatatatgcacacagctaacagagttgaacctttctattgacagagcagttttgaaacagtctttctgtggaatctgcaagtagatatttggatagattggaggatttcattggaaacgggattacgtataaaaagtagacagcagcatcctcagaaacttctttgtgatgtgtgcattcaagtcacagagttgaacattccctttcgtacagcagttttgaaacactctttctgtagtatctggaagtgaacattaggacagctttcaggtcgatggtgagaaaggcaatatcttcaaataaaaactagacagaagcattctcataaacttgtttgtgatgtgtgaactcagcttagagacgtggcatctttcttttgatagagcagttctgaaaaacacgttttgttgaatctgcaagcggacatttggatagatttgaagatttcgttggaaacgggaatatcttcatatcaaatctagacagaagcattctcagaaacgtctttgtgatgtttgcattcaactcatagagttgaacattccctttcagagagcagctttgaagcactctttttgtaggatgtgcaaggggatatttggagcgctctgaggcctaaggtgaaaaagcaaatatcttcccataaccactagacagaaacattctcagaaactcctttatgacgtatgcactcacctaacagagaagaaccttccttttgacagagcagttttgatacactctttttgtagaatctgcaagtggatatttggatagctgtgaagatttcgttggaatcgggaatatcatcctataaaatctagacagaagcattctcagaaacagctctgtgatgtctgcattcaagtcacagagttgaacattgcctttcatagagcaggtttgaaacgctctttttgaagtatatggaagtggacgtttcggacggtttgaggcccatggtgataaagggaatatctttccctacaagctacaaacaagcattctgtgaaacttgtttgtgatgtgtgtactcaattaacagagttgaaccttactttttaaagagcagttttgaaacactctttttgtagaatctgcgaggggatatttggatagatttcaggatttcgttggaaacgggaatatcttcatataaaatctcgacagaagcattctcagaaacttctttgtgatatgtgcattcaagtcacagagttgaatattccctttcacagagtaggtttgaaacactctttttgtagtatctggaagtggacatttggagcgccttgacacctacggtgcaaagggaaatatcttcccataaaaactagacagaagtaatctcagaatcttctttgggatatatgcacgcagctaacagagttgaacctttctattgacagagcagttttgaaacagtctttctgtggaatctgcaagtggatatttggatggcttggaggatttcgttggaaacgggattacgtataaaaattggacagcagcattctcagaaacttctttgtgatgtgtgcattcaagtcaaagtgttgaacattccctttcgtacagcagttttgaaacactctttctgtagtatctggaagtgaacgtgatgagagctttcaggtctatggtaagaaaggaaatatcttcaaataaaaactagacagaagcattctcataaacttgtttgtgatgtgtgaactcagctaacagaggtggatctttctttttatagagcagttctgaaaaacactttttgttgaatctgcaagtggacatttggatagatttgaagatttcgttggaaacgggaatatcttcatatcaaatctagacagaagcattctcagaaacgtctttgggatgtttgcattcaactcatagagttgaacattccgtttcagagaccagctttgaagcactctttttgtagtatgtgcaagtggatatttggagcgctctgaggcctacggtgaaaaagcaaatatcttcccataaccactagacagaaacattctcagaaactcctttatgacgtatgtactcaactaacggagaagaaccttccttttgacagagcagttttgatacactctttttgtagaatctgcaagtggatatttggatagctgtgaagatttcgttggaaacgggaatatcttcctgtaaaatctagacagaagcattctcaggaactgctctgcgatgtctgtattcaagtcacagagttgaacattgcctttcatagagcaggtttgaaacgctctttttgtagtatatggaagtggacgtttcggacggtttgaggcccatggtgataaagggaatatcttcccctacaagctagaaagaagcattctgtgaaacttgtttgtgatgtgtgtactcaactaacagagttgaacctttctttttacagagcagttttgaaacactctttttgtagaatctgcgatgggatatttggatacatttcagcatttcgttggaaacgggaatatcttcatataaaatctcgacagaagcattctcagaaacttctttgtgatatgtgcattcaagtcacagagttgaatattccctttcacagagtaggtttgaaacactctttttgtagtatctggaagtggacatttggagcgcctcgacgcctacggtgaaaagggcaatatcttcccataaaaactagacagaagcaatctcagaatcttctttgggatatatgcacgcagctaacagagttgaacctttctattgacagagcagttttgaaacagtctttctgtggaatctgcaagtggatatttggatagcttggaggatttccttggaaacgggattacgtataaaaagtagacagcagcatcctcagaaacttctttgtgatgtgtgcattcaagtcacagagttgaacattccctttcgtacagcagttttgaaacactctttctgtagcatatggaagtgaacattagaacagctttcaggtctatcgtgagaaaggaaatatcttcaaataaaaactagacagaagcattctgataaacttgtttgtgaagtgtgatctcagctaacagaggtggatctttcttgtgatagagcagttctgaaaaacactttgttgaatctgcaagtggacatttggatagatttgaagatttcgttggaaacgggaatatcttcatatcaaatctagacagaagcattctcagaaacgtctttgtgatgtttgcattcaactcatagagttgaacattccgtttcagagagcagctttgaagcacactttttgtagtatgtgcaaggggatatttggagcgctccgaggcctaaggtgaaaaagcaaatatcttcccataaccactagacagaaacattgtcagaaactcctttatgacgtatgcactcacctaacagagaagaaccttccttttgacagagcagttttgatacactctttttgtagaatctgcaagtggatatttggatagctgtgaagatttcgttggaaacgggaatatcttcctataaaatctagacagaagcattctcagaaactgctctgtgatgtctgcattcaagtcacagagttgaacattgcctttcatagagcaggtttgaaacgctctttttgtagtatatggaagtggacgtttcggacggtatgaggcccatggtgataaagggaatatcttcccctacaagctagaaagaagcattctgtgaaacttgtttgtgatgtgtgtactcaactaacagagttgaacctttctttttacagtgcagttttgaaacactctttttgtagaatctgcgaggggatatttggatagatttcaggatttcgttggaaacgggagtatcttcatataaaatctcgacagaagcattctcagaaacttctttgtgatatctgcctttaagtcacagagttgaatattccctttcacagagtaggtttgaaacactctatttgtagtatctggaagtggacatttggagcgccttgacacctacggtgaaaagggaaatatcttcccataaaaactagacagaagcaatctcagaatcttctttgggatatatgcacgcagctaacagagttgaacctttctattgacagagcagttttgaaacagtctttctgtggaatctgcaagtggatatttggatagcttggaggatttcgttggaaacgggattacgtatataaagtagaccacagcatcctcagaaacatccttgtgatgtgtgcattcaagtcacagagttgaacattccctttcgtacagcagatttgaaacactctttctgtagtatctggaagtgaactttaggacagctttcaggtctatagtgagaaaggatatatcttcaaataaaaactagacggaagcattctcataaacttgtttgtgatgtgtgaactcagctaacagaggtggatctttcttttgatagagcagttctgaaaaacactttttgttgaatctgcaagtggacatttggatagatgtgaagatttcgttggaaacgggaatatcttcatatccaatctagacagaagcattctcagaaacgtctttgtgatgtttgcattcaactcatagagttgaacattcccgtttcagagaccagctttgaagcactctttttgtagtatgtgcaagtggatatttggagcgctctgaggcctacggtgaaaaagcaaatatcttcccataaccactagacagaaacattctcagaaactcctttatgacgtatgcactctcctaacagaaaagaaccttccttttgacagagcagttttgatacactctttttgtagaatctgcaagtggatatttggatagctgtgaagatttcgttggaaacgggaatatcttcctataaaatctagacagaagcattctcagaaactgctctgtgatgtctgcattcaagtcacagagttgaacattgcctttcatagagcagatttgaaacgctctttttgtagtatatggaactggatgtttcggacggttggaggcccatggtgataaagggaatatcttcccctacaagctagaaagaagcattctgtgaagcttgtttgtgatgtgtgtactcaactaacagagttgaacctttctttttacagagcagttttgaagcactctttttgtagaatctgcgaggggatatttggatagatttcaggatttccttggaaacgggaatatcttcatataaaatctcgacagaaagcattctcagaaacttctttgtgatatctgccttcaagtcacagagttgaatattccctttcacagagtaggtttgaaacactctttttgtagtatctggaagtggacatttggagcgccttgacgcctacggtgaaaagggaaatatcttcccataaaaactagacagagcaatctcagaatcttctttgggatatatggacgcagctaacagagttgaacctttctattgacagagcagttttgaaacagtctttctgtggaatctgcaagtggatatttggatagcttgtaggatttcgttggaaacgggattacgtataaaaagtagacagcagcatcctcagaaacttctttgtgatgtgtgcgttcaagtcacagagttgaacattccctttcgtacagcagttttgaaacactctttctgtagtatctggaagtgaacattaggacagctttcaggtctatggtgagaaaggaaatatcttcaaataaaaactagacagaagcattctcataaacttgtttgtgatgtgtgaactcagctaacagaggtggatctttcttttgatagagcagttctgaaaaacacgttttgttgaatctgcaagtggacatttcgatagatttgaagatttcgttggaaacgggaatatcgtcatatcaaatctagacagaagcattctcagaaacgtctttgtgatgtttgcattcaactcatagagttgaacattccgtttcagagagcagctttgaagcactctttttgtagtatgtgcaagtggatatttggagtgctctgaggcctacggtgaaaaagcaaatatcttcccataaccactagacagaaacattctcagaaactcctttatgacgtatgtactcaactaacagagaagaaacttccttttgacagagcagttttgatacactctttttgtagaatctgcaagtggatatttggatagctgtgaagatttcgttggaaacgggaatatcttcctataaaatccagacagaagcattctcagaaactgctctgtgatgtctgcattcaagtcacagagttgaacattgcttttcctagagaaggtttgaaacgctctttttgtagtatatggaagtagacttttcggacggtttgaggcccatggtgataaagggaatatcttcccctacaagctagaaagaagcattctgtgaaacttgtttgtgatgtgtgtactcaactaacagagttgaacctttctttttacagagcagttttgaaacactctttttgtagaatctgcgaggggatatgtggatagatttcaggatttcgttggaaacgggaatatcttcatataaaatctcgacagaagcattctcagaaacttctttgtgatatgtgcattcaagtcacagagttgaatattccctttcacagtagtaggttggaaacactctttttgtagtatctggaagtggacatttggagcgccttgacacctacggtgaaaagggaaatatcttcccataaaaactagacagaagcaatctcagaatcttctttgggatatatgcacgcagctaacagagttgaatctttctattgacagagcagatttgaaacagtctttctgtggaatctgcaagtggatatttggatagattggaggatttctttggaaacgggattacgtataaaaagtagacagcagcatcctcagaaacttccttgtgatgtgtgcactcaagtcacagagttgaaaattccctttcgtacagcaggtttgaaacactctttctgtagtatctggaagtgaactttaggagagctttcaggtctatagtgaggaaggatatatcttcaaataaaaactagacagaagcattctcataaacttgtttgtgatgtgtgaactcagctaacagaggtggatctttcttttgatagagcagttctgaaaaacactttctgttgaatctgcaagtggacatttggatagatttgaagatttcgttggaaacgggaatatcttcatatcaaatctagacagaagcattctcagaaacgtctttgtgatgtttgcattcaactcatagagttgaacattccctttcagagagcagctttgaagcactttttgtagcatgtgcaagtggacatttggagcgccctgaggcctacggggaaaaagcaaatatcttcccataaccactagacagaaacattttcagaaactcctttatgacgtatgcactcacctaacagagaagaaccttccttttgacagagcagttttgatacactctttttgtagaatctgcaagtggatatttggatacctgtgaagatttcgttggaaacgggaatatcttcctataaaatctagacagaagcattctcagaaactgctactgtgatgtctgcattcaagtcacagagttgaacattgcctttcatagagcaggtttgaaatgctctttttgtagtatatggaagtggacgtttcagacggtttgaggcccatggtgataaagggaatatcttcccctacaagctagaaagaagcattctgtgaaacttgtttgtgatgtgtgtactcatctaacagagttgaacctttctttttacagagcagttttgaaacactctttttgtagaatctgcgaggggatatttggatagatttcaggatttcgttggaaacgggaatatcttcatataaaatctcgacagaagcattctcagaaacttctttgtgatatgtgcattcaagtcacagagttgaatattccctttcacagagtaggtttgaaacactctttttgtagtatctggaagtggacatttggagcgtccttggcgcctacggtgaaaagggaaatatcttcccataaaaactagacagcagcaatctcagaatcttctttgggatatatgcacgcagctaacagagttgaacctttctattgacagagcagttttgaaacagtctttctgtggaatctgcaagtggatatttggatagcttggaggatttcgttggaaacgggattacgtataaaagtagacagcagcatcctcagaaacttctttgtgatgtgtgcattcaagtcacagagttcaacattccctttcgtacagcagttttgaaacactctttctgtagtatctggaagtgaacattaggacagctttcaggtctatggtgagaaaggaaatatcttcaaataaaaactagacacaagcattctcataaacttgtttgtgatctgtgaactcagctaagagacgtggatctttcttttgatagagcagttctgaaaaacactttttgttgaatctgcaagtggacatttggatagatttgaagatttctttggaaacgagaatatcttcatatcaaatctagacagaagcattctcagaaacgtctttgtgatgtttgcattcaactcatagagttgaacattccctttccgagagcagctttgaagcactctttttgtagtatgtgcaagtggatatttggagcgctctgaggcctacggtgaaaaagcaaatatcttcccataaccactagacagaaacattctcagaaactcctttatgacgtatgcactcacctaacagagaagaaccttcctttcgacagagcagttttgatacactctttttgtggaatctgcaagtggatatttggatagctgtgaagatttcgttggaaacgggaatatcttcctataaaatctagacagaagcattctcagaaactgctctgtgatgtctgcattcaagtcacagagttgaacattgcctttcatagagcacgtttgaaacgctctttttgtagtatatggaagtggacgtttcggacggtttgtggcccatggtgataaagggaatatcttcccctacaagctagaaagaagcattatgtgaaacttgtttgtgaggtgtgtactcaactaacagagttgaacctttctttttacagagcagttttgaaacactctttttgtagaatctgcgaggggatatttggatagatttcaggatttcgttggaaaggggaatatcttcatataaaatctcgacagaagcattctcagaaacttccttgtgatatgtgcattcaagtcacagagttgaatattccctttcacagagtaggtttgaaacactctttttgtagtatctggaagtggacatttggagcgccctgacgcctacggtgaaaagggaaatatcttcccataaaaactagacagaagcaatctccgaatcttctttgggatatatgcacgcagctaatagagttgaacttttctattgacagagcagatttgaaacagtctttctgtggaatctgcaagtggatatttggatagcctggaggattacgttggaaacgggattacgtataaaaagtagacagcagcatcctcagaaacatccttgtgatgtgtgcattcaagtcacagagttgaacattccctttcatacagcagttttgaaacactctttctgtagtatctggaagtgaactttaggacagctttcaggtctatagtgagaaaggatatatcttcaaataaaaactagacagaagcattctgataaacttgtttgtgaagtgtgaactcagctaacagaggtggatctttcttttgattgaacagttctgaaaaacactttttgttgaatctgcaagtggacatttggatagatttgaagatttcgttggaaacgggaatatcttcatatcaaatctagacagaagcattctcagaaacgtctctgtcatgtttgcattcaactcatagagttgaacattccctttcagagagcagctttgaaacattctttttgtagtatgtgcaagtggatatttggagcgctctgaggcctacggtgaaaaagaaaatatcttcccataaccactagacagaaacattctcagaaactcctttatgacgtaagcactcacctaacagagaagaaccttccttttgacagagcagttttgttacactctttttgtagaatctgcaagtggatatttggatacctgtgaagatttcgttggaaacgggaatatcttcctataaaatctagacagaagcattctcagaaactgctctgtgatgtctgcattcaagtcacagagttgaacattgccgttcatagagcaggtttgaaacactctttttgtaggatatggaagtggacgtttcggacggtttgaggcccatggtgataaagggaatatcttcccctacaagctagaaagaagcattctgtgaaacttgtttgtgatgtgtgtactcaactaacagaggtgaacctttctttttacagagcagttttgaaacactctttttgtagaatctgcgaggggatatttggatacatttcaggatttcgttggaaacgggaatatcttcatataaaatctctacagaagcattctcagaaacttccttgtgatatgtgcattcaagtcacagagttgaatattccctttcacagagtaggtttgaaacactctttttgtagtatctggaagtggacatttggagcgccttgacacctacggtgaaaagggaaaaatcttcccataaaaactagacagaagcaatctcagaatcttctttgggatatatgcacgcagctaacagagttgaagctttctattgacagagcagttttgaaacagtctttctgtggaatctgcaagtggatatttggatagctttgaggatttcgttggaaacgggattacgtataaaaagtagacagcagcatcctcagaaacttctttgtgatgtgtgcattcaagtcacagagttgaacattccctttcgtacagcagttttgaaacactctttctgtagtatctggaagtgaacattaggacagctttcagctctatggtaagaaaggaaatatcttcaaataaaaactagacagaagcattctcataaacttctttgtgatgtgtgaactcagctaaccgaggtggatctttcttttgatagagcagttctgaaaaacactttttgttgaatctgcaagtggacatttggatagatatgaagatttcgttggaaacgggaataacttcatttcaaatctagacagaagcattctcagaaacgtctttgtgatgtttgcattcaactcatagagttgaacattccctttcagagagcagctttgaagcactctttttgtagtatgtgcaaggggatatttggagcgctctgaggcctaaggtgaaaaatcaaatatcttcccataaccactagacagaaacattctcagaaactcctttatgacgtatgcactcaactaacagagaagaaccttccttttgacagagcagttttgatacactctttttgtagaatctgcaagtggatatttggatacctgtgaagatttcgttggaaacgggaatatcttcctataaaatctagacagaagcattctcagaaactgctctgtgatgtctgcattcaagtcacagagttcaacattgcctttcatagagcaggtttgaaatgctctttttgtagtatatggaagtggacttttcggacggtttgaggcccatggtgataaagggaatatcttcccctacaagctagaaagaagcattctgtgaaacttgtttgtgatgtgtgtactcaactaacagaattgaacctttcttttcacagagcagttttgaaacactctttttgtagaatctgcgaggggatatttggatagatttcaggatttcgttggaaacgggaatatcttcatataaaatctcgacagaagcattctcagaaacttctttgtgatatctgcattcaagtcacagagttgaatattccctttcacagagtaggtttgaaacactctttttgtagtgtctggaagtggacatttggagcacattgacacctactttgaaaagggaaatatcttcccataaaaactagacagaagcaatctcagaatcttctttgggatatttgcacgcagctaacagagttgaacctttctattgacagagcagttttgaaacagtctttctgtggaatctgcaagtggatatttggatagcttggaggatttcattggaaacgggattacgtataaaaattagacagcagcatcctcagaaacttctttgtgatgtgtgcattcaagtcacagagttgaacattccctttcgtacagcagttttgaaacactctttctgtagtaactggaagtgaacattaggacagctttcaggtgtatggtgagaaaggaaatatcttcaaataaaaactagacagaagcattctcataaacttgtttgtgatgtgtgaactcagctaacagaggtggatctttcgtttgatagagcagttctgaaaaacactttttgttgaatctgcaagtggacatttggatagatttgaagatttcgttggaaacgggaatatcttcatatcaaatctagacagaagcattctcagaaacgtctttgtgatgttagcattcaactcatagagttgaacattcccgttcagagagcagctttgaagcactctttttgtagtatgtgcaagtggatatttggagcgctctgaggcctatggtgaaaaagcaaatatcttcccataaccactagacagaagcattctcagaaactcctttatgacgtatgcactcacctaacagaaaagaaccttccttttgacagagcagttttgatacactctttttgtagaatctgcaagtggatatttggatagctgtgaagatttcgttggaaacgggaatatcttcctataaaatctagacagaagcattctcagaaactgctctgtgatgtctgcattcaagtcacagagttgaacattgcctttcatagagcaggtttgaaacgctctttttgtagtatatggaagtggacgtttcggacggtttgaggcccatggtgataaagggaatatcttcccctactagctagaaagaagcattgtgtgaaacttgtttgtgatgtgtgtactcaactaacagagttgaacctttctttttacagagcagttttgaaacactcgttttgtagaatctgcgaggggatatttggatagatttcaggatttcgttggaaacgggaatatcttcatataaaatctcgacagaagcattctcagaaacttctttgtgatatctccattcaagtcaccgagttgaatattccctttcacagagtaggtttgaaacactctttttgtagtatctggaagtggacatttggagcgccttgacgcctacggtgaaaagggaaatatcttcccataaaaactagacagaagcaatctcagaatcttctttgggatatatgcacgcagctaacacagttgaacctttctattgacagagcagttttgaaacagtctttctgtggaatctgcaagtggatatttggagagcttggaggatttcgttggaaacgggattacgtataaaaagtagacagcagcatcctcagaaacttctttgtgatgtgtgcattcaagtcacagagttgaacattccctttcgtacagcagttttgaaacactctttctgtagtatctggaagtgaacattaggacagctttcaggtctatggtgagaaaggaaatatcttcaaataaaaagtagacagaagcattgtcataaacttgtttgtgatgtgtgaactcagctaacagaggtggatctttcttttgatagagcagttctgaaaaacacgttttgttgaatctgcaagtggacatttggatagatttgaagatttcgttggaaacgggaatatcttcatatcaaatctagacagaagcattctcagaaacgtctttgtgatgtttgcattcaactcatagagttgaacattccgtttcagagagcagctttgaggcactctttttgtagtatgtgcaagtggatatttggagcgctctgaggcctaaggtgaaaaagcaaatatcttcccataaccactagacagaaacattctcagaaactcctttatgacgtatgcactcacctaacagaaaagaaccttccttttgacagagcagttttgatacactctttttgtagaatctgcaagtggatatttggatagctgtgaagatttcgttggaaacgggaatatcttcctataaaatctatacagaagcattctcagaaactgctctgtgatgtctgcattcaactcacagagttgaacattgcctttcatagagcaggtttgaaatgctctttttgtagtatatggaagtggacgtttcagacggtttgaggcccatggtgataaagggaatatcttcccctacaagctagaaagaagcattctgtgaaacttgtttgtgatgtgtgtactcaaccaacagagttgaacctttctttttacagagcagtgttgaaacactctttttgtagaatctgcgaggggatatttggatagatttcaagatttcgttggaaacgggaatatcttcatataaaatctcgacagaagcattctcagaaacttctttgtgatatgtgcattcaagtcacagagttgaatattccctttcacagagtaggtttggaacactctttttgtagtatctggaagtggacatttggagcgccttgacgcctacggtgaaaagggaaatatcttcccataaaaactagacagaagcaatctcagaatcttctttgggatatatgcacgcagctaacagagttgaacatttctattgacagagcagttttgaaacagtctttctgtggaatctgtaagtggatatttggatagattggaggatttcgttggaaacgggattacgtataaaaagtagacagcagcatcctcagaaacttctttgtgatgtgtgcattcaagtcacagagttgaacattccctttcgtacagcagttttgaaacactctttctgtagtatctggaagtgaacattaggacagctatcaggtctatggtgagaaaggaaatatcttcaaataaaaactagacagaagcattctcataaacttgtttgtgatgtgtgaactcagctaacagaggtggatctttcttttgatagagcagttctgaaaaacactttttgttgaatctgcaagtggacatttggatagatttgaagatttcattggaaacgggaatatctttatatcaaatctagacagaagcattctcagaaacgtctttgtgatgtttgcattcaactcatagagttgaacattccgtttcagagagcagctttgaggcactctttttgtagtatgtgcaagtggatatttggagctctctgaggcctacggtgaaaaagcaaatatcttcccataaccactagacagaaacattctcagaaactcctttatgacgtatgcactcacctaacagagaagaacctcccttttgacagagcagttttgatacactctttttgtagaatctgcaagtggatatttggatacctgtgaagattttgttggaaacgggaatatcttcctataaaatctagacagaagcattctcagaaactgctatgtgatgtctgcattcaagtcacagagttgaacattgcctttcctagagcaggttttaaacgctctttttgtagtatatggaagtggacgtttcggacggtttgaggcccatggtgataaagggaatatcttcccctacaagctagaaagaagcattctgtgaaacttgtttgtgatgtgtgtactcaactaacagagttgaacctttctttttgcagagcagttttgaaacactcttttgtagaatctgcgaggggatatttggatagatttcaggatttcattggaaacgggaatatcttcatataaaatctcgacagaagcattctcagaaacttctttgtgatatctgcattcaagtcacagagttgaatattcactttcacagagtaggtttgaaacactccttttgtagtatctggaagtggacatttggagcgccttgacgcctacggtgaaaagggaaatatcttcccataaaaactagacagaagcaatctcagaattttctttgggatatatgcacacagctaacagagttgaacttttctattgacatagcagttttgaaacagtctttcggtggaatctgcaagtggatatttggatagcttggaggatttcgttggaaatgggattacgtataaaaagtagacagcagcatcctcagaaacttctttgtgatgtgtgcattcaagtcacagagttgaacatttcctttcgtacagcagttttgaaacactctttctgtattatctggaagtgaacattaagacagctttcagctctatggtgagaaaggaaatatcttcaaataaaaactggacagaagcattctcataaacttgtttgtgatgtgtgaactcagctaaccagagggggatctttcttttgatagagcagttctgaaaaacactttttgttgaatctgcaagtggacatttggatagatttgaagatttcgttggaaacgggaatatcttcatatcaaatctagacagaagcattctcagaaacgtctttgtgatgtttgcattcaactcatagagttgaacaattccctttcagagagcagctttgaagcactctttttgtagtatgtgcaaggggatatttggagcgctctgaggcctaaggtgaaaaagcaaatatcttcccataaccactagacagaaacattctcagaaactcctttatgacgtatgcactcacctaacagagaagaaccttccttttgacagagcagttttgatacactctttttgtaggatctgcaagtggatatttggatagctgtgaagatttcgttggaaacgggaatatcttcctataaaatctagacagaagcattgtcagaaactgctctgtgatgtctgcattcaagtcacagagttgaacattgcctttcatagagcagctttcaaacactctttttttagtatatggaagtggacgtttcggacggtttgaggcccatggtgataaaggaaatatcttcccctacaagctagaaagaagcattctgtgaaacttgtttgtgatgtgtgtactcaactaacagagttgaacctttctttttacagaacagttttgaaacactcttttgtagaatctgcgaggggatatttggatagatttcaggatttcgttggaaacgggaataacttcatataaaatctcgacagaagcattctcagaaacttctttgtgatatctgccttcaagtcacagagttgaatattccctttcacagagtaggtttgaaacactctttttgtagtatctggaagtggacatttggagcgccttgacgcctacggtgaaaagggtaatatcttcccataaaaactagacagaagcaatctcagaatcttctttgggatatatgcacgcagctaacagagttgaacctttctattgacagagcagttttgaaacagtctttctgtggaatctgcaagtggatatttggatagcttggaggatttcgttggaaacaggattacgtataaaaagtagacagcagcatcctcagaaacttccttgtgatgcgtgcattcaagtcacagagttgaatattccctttcgtacagcagttttgaaacactctttctgtagtatctggaagtgaactttaggagagctttcaggtctatagtgagaaaggatatatcttcaaataaaaactagacagaagcattctcatgtgtgatgtgtgaactcagctaacagaggtggatctttcttttcatacagcagttttgaaaaacactttttgttgaatctgcaagtggacatttggatagatttgaagatttcgttggaaacgggaatatcttcatatcaaatctagacagaagctttctcagaaacgtctttgtgatgtttgcattcaactcatagagttgaacattccgtttcagagagcagctttgaggcactctttttgtagtatgtgcaagtggatatttggagcgctctgaggcctacggtgaaaaagcaaatatcttcccataaccactagacagaaacattctcagaaactcctttatgacgtatgcactcacccaacagagaagaaccttccttttgacagagcagttttgatacactctttttgtagtatctgcaagtggatattgggatagctgtgaagatttcgttggaaacgggaatatcttcctataaaatctagacagaagcattctcagaaactgctctgtgatgtctgcattcaagtcacagagttgaacattacctttcatagagcaggtttgaaacgctctttttgtagtatatggaagtggacgtttcggacggtttgaggcccatggtgataaagggaatatcttcccctacaagctagaaagaagcattctgtgaaacttgtttgtgatgtgtttactcaactaacagagttgaacttttcttttgatagagcagttttcaaacattcttttttgtagagtctgcaagtggatatttggctagctttgaggattttgttggaaacgggaatatcttcacataaaaactaggcagaagcattctcagaaacttctttgtgatatctgcattcaagtcacagagttgaatattccctttcacagagtaggtttgaaacactctttttgtagtatctggaagtggacatttggagcgccttgacgcctaaggtgaaaagggaaatatcttcccataaaaactagacagaagcaatctcagaatcttctttgggatatatgcacgcagctaacagagttgaacttttctattgacagagcagttttgaaacagtctttctgtggaatctgcaagtggatatttggatagattggaggatttcgttggaaacgggattacgtataaaaagtagacagcagcatcctcagaaacttctttgtgatgtgtgcattcaagtcacagagttgaacattccctttcgtacagcagttttgaaacactctttctgtagtatctggaagtgaacattaggacagctttcaggtctatggtgagaaaggaaatatcttctaataaaaacaagacagaagcattctcataaacttgtttgtgatgtgtgaactcagctaacagaggaggatctttcttttgatagagcagttctgaaaaacactttttgttgaatctgcaagtggacatttggatagatttgaagatttcgttggaaacgggaatatcttcatatcaaatctagacagaagcattctcagaaacgtctttgtgatgtttgcattcaactcatagagttgaacattccctttcagagagcagctttgaagcactctttttgtagtatgtggaagtggatatttggagcgctctgaggcctacggtgaaaaagcaaatatcttcccataaccactagacagaaacattctcagaaactcctttatgacgtatgcactcacctaacagagaagaaccttccttttgacagagcagttttgatacactctttttgtagaatctgcaagtggatattttgatagctgtgaagatttcgttggaatcgggaatatcttcctacaaaatctagacagaagcattctcagaaactgctctgtgatgtctgcattcaagtcacagagttgaacattgcctttcatttagcaggtttgaaacgctctttttgtagtatatggaagtggacgtttcggactgtttgaggcccatggtgataaagggaatatcttcccctacaagctagaaagaagcattctgtgaaacttatttgtgatgtgtgtactcaactaacagagttgaacctttctttttacagagcagttttgaaacactctttttgtagaatctgcgaggggatatttggatagatttcaggatttcgttggaaacgggaatatcttcatataaaatctcgacagaagcattctcagaaacttctttgtgatatgtgcattcaagtcacagtgttgaatattccctttcacagagtaggtttgaaacactctttttgttgtatctggaagtggacatttggagcgccttgacacctacgatgaaaagggaaatatcttcccataaaaactagacagaagcaatctcagaatcttctttgggatatatgcacgcagctaacagagttgaacctttctattgacagagcagttttgaaacagtctttctgtagaatctgcaagtggatatttggatagcttggaggatttcattggaaacgggattacgtataaaaagtagacagcagcatcctcagaagcttctttgtgatgtgtgcattcaagtcacagagttgaacattccctttcgtacagcagttttgaaacactctttctgtagtatctgggagtgaacattaggacagctttcaggtctatggtgagaaaggaaatatcttcaaataaaaactagacagaagcattctcataaacttgtttgtgatgtgtgaactcagctaacagaggtggatctttcttttgatagaggagttctgaaaaacactttttgttgaatctgcaagtggacatttggatagatttgaagatttctttggaaacgggaatatcttcatatcaaatctagacagaagcattctcagagacgtctttgtgatgtttgcattcaactcatagagttgaacattccgtttcagagagcagctttgaggcactctttttgtagtatgtgcaagtggatatttggagcgctctgaggcctacggtgaaaaagcaaatatcttcccataaccactagacagaaacattctcagaaactcctttatgacgtatgcactcacctaacagagaagaaccttccttttgacagagcacttttgatacactctttttgtagaatctgaaagtggatatttggatagctgtgaagatttcgttggaaacgggaatatcttcctataaaatactagacagaagcattctcagaaactgctctgtgatgtctgcattcaagtcacagagttgaacattgcctttcatacagcaggtttgaaacgctctttttgtagtatatggaagtggacgtttcggacggtttgaggcccatggtgataaagggaatatcttcccctacaagctagaaagaagcattctgtgaaacttgtttgtgatgtgtgtactcaactaacagagttgaacctttctttttagagagcagttttgaaacactctttttgtagaatctgcgaggggatatttggatacatttcaggatttcgttggaaacgggaatatcttcatataaaatctcgacagaagcattctcagaaacttctttgtgatatgtgcattcaagtcacagagttgaatattccctttcacagagtaggtttgaaacactctttttgtagtatctggaagtggacatttggagcgccttgacgcctacggtgaaaagggaagtatcttcccatcaaaactagacagaagaaatctcagaatcatctttgggatatatgcacgcagctaacagagttgaacctttctattgacagagcagattagaaacagtctttctgtggaatctgcaagtggatatttggatagcttggaggatttcgttggaaacgggattacgtataaaaagtagacagcagcatcctcagaaagttctttgtgatgtgtgcattcaagtcacagagttgaacattccctttcgtacagcagttttgaaacactctttctgtagtatctggaagtgaacatttggacagctttcagctctatggtgagaaaggaaatatcttcaaataaaaactagacagaagcattctcataaacttgtttgtggtgtgtgaactcagctaacagaggtggatctttcttttgatagagcagttctgaaaaacactttttgttgaatctgcaagtggacatttggatagatttgaagatttcgttggaaacgggaatatcttcatatcaaatctagacagaagcattgtcagaaacgtctttgtgatgtttgcattcaactcatagagttgaacattccctttcagagagcagatttgaagcactctttttgtagtatgtgcaagtggatatttggagcgctctgaggccttcggtgaaaaagcaaatatcttcccataaccactagacagaaacattctcagaaacccctttatgacgtatgtactcaaataacagagaaggaccttccttttgacagagcagttttgatacactctttttgtagaatctgcaagaggatatttggatagctgtgaagatttcgttggaaacgggaataccttcctataaaatctagacagaagcattctcagaaactgctctgtgatgtctgcattcaagtcacagagttgaacattgcctttcatagagcaggtttgaaacgctctttttgtagtatatggaagtggatgtttcggacggttggaggcccatggtgataaagggaatatcttcccctaaaagctagaaagaagcattctgtgaaacttgtttgtgatgtgtgtactcaactaacagagttgaacctttctttttacagagcagttttgaaactctctttttgtagaatctgcgaggggatatttgtatagatttcaggatttcgttggaaacgggaatatcttcatataaaatctcgacagaagcattatcagaaacttctttgtgatatgtgcattcaagtcacagagttgaatattccctttcacagagtaggtttgaaacactctttttgtagtatctggaagtggacatttggagcgccttgacgcctacggtgaaaagggaaatatcttcccataaaaactagacagaagcaatctcagaatcttctttgggatatatgcacgcagctaacagagttgaacctttctattgacagagcagttttgaaacagtctttctgtggaatctgcaagtggatatttggatagcttggaggatttcgttggaaacgggattacgtataaaaagtagacagcacgcatcctcagaaacttctttgtgatgtgtgcattcaagtcacagtagttgaacattccctttcgtacagcagttttgaaacactctttctgtagtatctggaagtgaacattaggacagctttcaggtctatggtgagaaaggaaatatcttcaaataaaaactagacagaagcattctcataaacttgtttgtgatgtgtgaactcagctaacagaggtggatctttcttttgatagagcagttctgaaaaacactttttgttgaatctgcaagtggacatttggatagatttgaagatgtcgttggaaacgggaatatcttcatatcaagtctagacagaagcattctcagaaacgtctttgtgatgtttgcattcaactcatagatttgaacattccgtttcagagagcagctttgaggcacactttttgtagtatgtgcaagtggatatttggagcgctctgaggcctacggtgaaaaagcaaatatcttcccataaccactagacagaaacattctcagaaactcctttatgactgtatgcactcacctaacagagaagaaccttccttttgacagagcagttttgatacactctttttgtagaatctgcaagtggatattgggatagctgtgaagatttcgttggaaacgggaatatcttcctataaaatctagacagaagcattctgtgaaacttgtttgtgatgtgtgtactcaactaacagagttgaacctttctttttacagagcagttttgaaacactctttttgtagaatctgcgaggggatatttggatagatttcaggatttcgttggaaaccggaatatcttcatataaaatctcgacagaagcattctcagaaacttctttgtgatatctgcattcaagtcacagagttgaatattccctttcacagagcagttttgaaacactctttttgtagaatctgcgaggggatatttggatagatttcaggatttcgttggaaacgggaataacttcatataaaatctcgacagaagcattctcagaaacttctttgtgatatgtgcattcaagtcacagagttgaatattccctttcacagagtaggtttgaaacactctttttgtagtatctggaagtggacatttggagctccttgacacctacggtggaaagggaaatatcttcccataaaaactagacagaagcaatctcagaatcttctttgggatatatgcacgcagctaacagagttgaacctttctattgacagagcagttttgaaacagtctttctgtggaatctgcaagtggatatttggatagcttggaggatttcgttggaaaccggattacgtataaaaagtagacagcagcatcctcagaaaattctttgtgatgtgtgcattcaagtcacagagttgaacattccctttcgtacagcagttttgaaacactctttctgtagtatctggaagtgaacattaggacagctttcagctctatggtgagaaacaaaatatcttcaaataaaaactagacagaagcattctcataaacttgtttgtgatgtgtgaactcagctaacagaggtggatctttcttttgatagagcagttctgaaaaacactttttgttgaatctgcaagtggacatttggatagatttgaagatttcgttggaaacggcaatatcttcatatcaaatctagacagaagtattctcagaaacgtctttgtgatgtttgcattcaactcatagagttgaacattccgtttcagagagcagctttgaggcactctttttgtagtatgtgcaagtggatatttggagcgctctgaggcctacggtgaaaaagcaaatatcttcccataaccactagacagaaacattctcagaaactcctttataacgtatgcactcacctaacagagaagaaccttccttttgacagagcagttttcatacactctttttgtagaatctgcaagtggatatttggatagctgtgaagatttcgttggaaacgggaatatcttcctataaaatctagacagaagcattctcagaatctgctctgtgatgtctgcattcaagtcacagagttgaacattgtctttcatagagcaggtttgaagcgttctttttgtagtatatggaagcggacgtttcggacggtttgaggcccatggtgataaagggaatatcttcccctacaagctagaaagaagcattctgtgaaacttgtttgtgatgtgtgtactcaactaacagagttgaacctttctttttacagaacagttttgaaacactctttttttagaatctgcgaggggatatttggatagatttcaggatttcgttggaaacgggaatatcttcctataaaatctcgacagaagcattctcagaaacttctttgtgatatgtgcattcaagtcacagagttgaatattccctttcacagagtaggtttgaaacaatctttttgtagtatctggaagtggacatttggagcgccttgacacctacggtgaaaagcgaaatatcttcccacaaaaattagacagaagcaatctcagaatcttctttgggatatatgcacacagctaacagagttgaacctttctattgacagagcagttttgaaacagtctttctgtggaatctgcaagtggatatttggatagcttggaggatttcgttggaaacgggattacgtatcaaaagtagacagcagcatcctcagaaacttctttgtgatgtgtgcattcaagtcacagagttgaacattccctttcgtacaacagttttgaaacactctttctgtagtatctggaagtgaacattaggacagctttcagctctatggtgagaaaggaaatatcttcaaataaaaactagacagaagcattctgataaacttgttcgtgaagtgtgaactcagctaacagaggtggatctttcttttgatagagcagttctgaaaaacactttttgttgaatctgcaagtggacatttggatagatttgaagatttcgttggaaacgggaatatcttcatatcaaatctagacagaagcattctcagaaacgtctttgtgatgtttgcattcaactcatagagtagaacattccgtttcagagagcagctttgaggcactctttttgtagtatgtgcaagtggatatttggagcgctctgaggtctacggtgaaaaagcaaatatcttcccataaccactagacagaagcattctcagaaaatcctttatgacgtatgcactcacctaacagaaaagaaccttccttttgacagagcagttttgatacactctttttgtagaatctgcaagtggatatttggatagctgtgaagatttcgttggaaacgggagtatcttcctataaaatttagacagaagcattctcagaaactgctctgtgatgtctgcattcaagtcacagagttgaacattgcctttcctagagcaggtttgaaacgctctttttgtagtatatgaaagtggacgtttcggacggtttgaggaccatggtgataatgagaatatcttcccctacaagctagaaagaagcattctgtgaatcttgtttgtgatgtgtgtactcaactaacagagttgaacctttctttttacagagcagttttgaaacactctttttgtagaatctgcgaggggatatttggatagatttcaggatttcgttggaaaccggaatatcttcatataaaatctcgacagaagcatcctcagaaacttctttgtgatatgtgcattcaagtcacagagttgaatattccctttcacagagtaggtttgaaacactctttttgtagtatctggaagtggacatttggagcgccttgacgcctacggtgaaaagggaaatatcttcccataaaaactagacagaagcaatctcagaatcttctttgggatatatgcacgcagctaacagagttgaacctttctattgacagagcagttttgaaacagtctttctgtggaatctgcaagtggatatttggatagctaggaggatttctttggaaacgggattacgtataaaaagtagacagcagcatcctcagaaacttctttgtgatgtgtgcattcaagtcacagagttgaacattccttttcgtacagcagttttgaaacactctttctgtagtatctggaagtgaacattatgacagctttcaggtctatggtgagaaaggaaatatcttcaaataaaaacaagacagaagcattctcataaacttgtttgtgatgtctgaactcagctaacagacgtggatctttcttttgatacagcagttttgaaaaacactttttgttgaatctgcaagtggacatttggatagatttgaagatttcgttggaaacgggaatatcttcatatcaaatctagacagaagcattctcagaaacgtctttgtgatgtttgcattcaactcatagagttgaacattccgtttcagagagcagctttgaagcactctttttgtagtatatgcaagtggatatttggagcgctctgaggcctacggtgaaaaagcaaatatcttcccataatcactagacagaaacattctcagaaactcctttatgacgtatgtactcacctaacagagaagaaccttccttttgacagagcagttttgatacactctttttgtagaatctgcaagtggatatttggatagctgtgaagatttcgttggaaacgggaatatcttcctataaaatctagacagaagcattctcagaaactgctctgtgatgtctgcattcaagtcacagagttgaacactgcctttcctagagcaggtttgaaacgctctttttgtagtatatggaagtggacgtttcgtacggtttgaggcccatggtgataaagggaatatcttcccctacaagctagaaagaagcattctgtgaaacttgtttgtgatgtgtgtactcaactaacagagttgaacctttctttttacagagcagttttgaaacactctttttgtagaatctgcgaggggatatttggatacatttcaggatttcgttggaaacgggaatatcttcatataaaatcttgacagaagcattctcagaaacttccttgtgatatgtgcattcaagtcacagagttgaatattccctttcacagtagtaggtttgaaacactctttttgtagtatctggaagtggacatttggagcgccttgacgcctacggtgaaaagggaaatatcttcccataaaaactagacagaagcaatctcagaatcttctttgggatatatgtacgcagctaatagagttgaacctttatattgacagagcagttttgaaacagtctttctgtggaatctgcaagtggatatttggatagcttggaggatttcgttggaaacgggattacgtataaaaagtagacagcagcatcctcagaaacttctttgtgatgggtgcattcaagtcacagagttgaacattccctttcgtacagcagttttgaaacactctttctgtagtatctggaagtgaacattaggacagctttcaggtctatggtgagaaaggaaatatcttcaaataaaaactagacagaagcattctcataaacttgtttgtgatgtgtgaactcagctaacagaggtggatctttcttttgatagagcagttctgaaaaacactttttgttgaatctgcaagtggacatttggatagatttgaagatttcgttggaaacgggaatatcttcatatcaagtctagacagaagcattctcagaaacgtctttgcgttgtttgcattcaactcatagagttgaacattccgtttcagaaagcagatttgaggcactctttttgtagtatgtgcaagtggatatttggagcgctctgaggcctacggtgaaaaagcaaatatctttccataaccactagacagaaacattctcagaaacttctttatgacgtatgtactcaactagcagagaagaactttccttttgacagagcatttttgatacactctttttgtactatctgcaagtggatatttggatagctgtgaagatttcgttggaaacgggaatatcttcctataaagtctggacagaagcattctcagaaactgctctgtgatgtctgcattcaagtcacagagttgatcattgcctttcatagagcaggtttgaaacgctctttttgtagtatatggaagtggacgtttcagacggtttgaggcccatggtgataaagggaatatcttcccctacaagctagaaagaagcattctgtgaaacttgtttgtgaggtgtgtactcaactaacagagttgaacctttctttttacagagcagttttgaaacactctttttgtagaatctgcgagggcatatttggatagatttcagaatttcgttggaaaggggaatatcttcatataaaatctcgacagaagcattctcagaaacttctttgtgatatgtgcattcaagtcacagagttgaatattccctttcacagagtaggtttgaaacactctttttgtagtatctggaagtggacatttggagcgccttgatgcctacggtgaaaagggaaatatcttcccataaaaattcgacagaaggaatctcagaatcttctttgggatatatgcacgcaactaacagagttgaacctttctattgacagagcagttttgaaacagtctttctgtggaatctgcaagtggatatttggatagcttggaggatttcgttggaaacgggattacgtataaaaagtagacagcagcatcctcagaaacttctttgtgatgtgtgcattcaagtcacagagttgaacattccttttcgtacagcagttttgaaacactctttctgtagtatctggaagtgaacattaggacagctttcagctctatggtgagaaaggaaatatcttcaaataaaaactagacagaagcattctcataaacttgtttgtgatgtgtcaactcagctaacagaggtggatctttcttttgatagagcagttctgaaaaacactttttgttgaatctgcaagtggagatttggatagatttgaagatttcgttggaaacgggaatatcttcatatcaaatctagacagaagcattctcagaaacgtctttgcgatgtttgcattcaactcatagagttgaacattccctttcagagagcagctttgaggcactctttttgtagtatgtgcaagtggatatttggagcgccctgaggcctacggggaaaaagcaaatatcttcccataaccactagacagaaacattctcagaaactgctttatgacgtatgcactcacctaacagagaagaaccttccttttgacagagcagttttgatacactctttttgtagaatcagcaagtggatatttggatagctgtgaagatttcgttggaaacgggaatatcttcctataaaatctagacagaagcattctcagaaactgccctgtgatgtctgcattcaagtcacagagttgaacattgcctttcatagagcaggtttgaaacgctctttttgtagtatatggaagtagacgtttcggacggtttgaggcccatggtgataaagggaatatcttcccctacaagctagaaagaagcattctgtgaaacttgtttgtgatgtgtatactcaactaacagagttgaacctttctttttacagagcagttttgaaacactctttttgtagaatctgcgaggggatatttggatagatttcaggatttcgttggaaacgggaatatcttcatttaaaatctcgacagaagcattctcagaaacttctttgtgatatctgccttcaagtcacagagttgaatattccctttcgcagagtaggtttgaaacactctttttgtagtatctggaagtggacaattggagctccttgacacctacggtgaaaagggaaatatcttcccataaatactagacagaagcaatctcagaatcttctttgggatatgtgcacgcagctaacagagttgaacctttctattgacagagcagttttgaaacagtctttctgtggaatctgcaagtggatattttgatagattggaggatttcgttggaaacgggattacgtataaaaagtagacagcagcatcctcagaaacttctttgtgatgtgcgcattcaagtcacagagttgaatattccctttcgtacagcatttttgaaacactctttctgtagtatctggaagtgaacattaggacagctttcaggtctatggtgagaaaggaaatatcttcaaataaaaactagacagaagcattctcataaacatgtttgcgatgtctgaactcagctaacagaggtggatctttcttttgatagagcagttctgaaaaacacttttcgttgaatctgcaagtggacatttggatagatttgaagatttcgttggaaacgggaatatcttcatatcaaatctagacagaaagcattctcggaaacgtctttgtgatgtttgcattcaactcatagtatttgaacattccgtttcagagagcagctttgaggcactcattttgtagtatgtgcaagtggatattgggagcgctctgaggccttcggtgaaaaagcaaatatcttcccataaccactagacagaaacattctcagaaactcgtttatgacgtatgcactcacctaacagagaagaaccttccatttgacagagcagttttgatgcactctttttgtagaatctgcaagtggatatttggatagctgtgaagattttgctggaaacgggaatatcttcctataaaatctagacagaagcattctcagaaactgctctgtgatgtctgcattcaagtcacagagttgaacattgcctttcatggagcaggtttgaaacgctctttttgtagtatatggaagtggacgattcggatggtttgaggcccatggtgataaagggaatatcttcccctacgagctagaaagaagcattctgtgaaacttgtttgtgatgtgtgtactcaactaacagagttgaacctttctttttacagagcagttttgaaacactctttttgtagaatctgcgaggggaagtttggatagatttcaggatttagttggaaacgggaatatcttcatataaaatctcgacagaagcattctcataagcttctttgtgatatgtgcattcaagtcacagagttgaatattccctttcacagagtaggtttgaaacactctttttgtagtatctgaagtggacatttggagcgccttgacgcctacggtgaaaagggaaataccttctcataaaaagtagacagaagcaatctcagaatcttctttgggatatatgcacgcagctaacagagttgaacctttctattgacagagcagttttgaaacagtctttctgtggaatctgcaagtggatatttggatagcttggaggatttcgttggaaacgggattacgtataaaatgtagaaagccgcatcctcagaaacttctttgtgatgtgtgcattcaagtcacagagttgaatattccctttcgtacagcagttttgaaacactctttctgtagtatctggaagtgaacattaggacagctttcaggtctatggtgagaaaggaaatatcttcaaataaaaactagacagaagcagtctgataaacttgtttgtgaagtgtgaactcagctaacagaggtggatctttcttttgatacagcagttttgaaaaacactttgttgaatctgcaagtggacatttgtatagatttgaaaatttcgttggaaacgggaatatcttcatatcaaatctagacagaagcattctcagaaacgtctttgtgatgtttgcattcaactcatagagttgaacattccgtttcagagagcagctttgaagcactctttttgtagtatgtgcaagtggacatttggagcgctttgaggcctacggtgaaaaagcaaatatgcttcccataaccactagacagaaacattctcagaaactcctgtatgacgtatgcactcacctaacagagaagaaccttccttttgacagagcagttttgatacactctttttgtagaatctgcaagtggatatttggatagctgtgaaggtttcgttggaaacgggaatatcttcctataaaatctagacagaagcattctcagaaactgctgctgtgatgtctgcattcaagtcacagagttgaacattgcctttcatagagcaggtttgaaacgctctttttgtagtatatggaagtagacgtttcggacggtttgaggcccatggtgataaagggaatatcttcccctacaagctagaaagaagcattctgtgaaacttgtttgtgatgtgtgtactcaactaacagagttgaaccttcctttttacagagcagttttgaaacactctttttgtagaatctgcgaggggatatttggatagatttcaggatttcgttgggaacgggaatatcttcatataaaatctcgacagaagcattctcagaaacttctttgtgatatgtgcattcaagtcacagagttgaatattccctttcacagagtaggtttgaaacactctttttgtagtatctggaagtggacatttggagcgccttgacgcctacggtgaaaagggaaatatcttcccataaaaacgagacagaagcaatctcagaatcttctttgggatatatgcacgcagctaacagtgttgaacctttctattgacagagcagttttgaaacagtctttctgtggaatctgcaagtggatatttggatagcttggaggatttcgttggaaacgggattacgtataaaaagtagacagcagcatcctcagaaacttctttgtgatgtgtgcattcaagtcacagagttgaacattccctttcgtacaccagttttgaaagactctttctgtagcatctggaagtgaacattaggacagctttcaggtctatggtgagaaaggaaatatcttcaaataaaaactagacagaagcattctcataaacttgtttgtgatgtgtgaactcagctaacagaggtggatctttcttttgatagagcagttctgaaaaacactttttgttgaatctgcaaggggacatttggatagatttgaagatttcgttggaaacgggaatatcttcatatcaaatgtagacagaagcattctcggaaacgtctttgtgatgtttgcattcaactcataaagttgaacattccgtttcagagagcagctttgaggcactctttttgtagtatgtgcaagtggatatttggagcgctctgaggccttctgtgaaaaagcaaatatcttcccataaccactagacagaaaacattctcagaaactcctttatgacgtatgcactcacctaacagagaagaaccttccttttgacagagcagttttgatacactctttttgtagaatctgcaagaggatattgggatagctgtgaagatttcgttggaaacgggaatatcttcctataaaatctagacagaagcattctcagaaactgctctgtgatgtctgcattcaagtcacagagttgaacattgcctttcatagagcaggtttgaaacgctctttttgtagtatatggaagtggacgtttcggacggtttgaggcccatggtgataaagggaatatcttgccctacaagctagaaagacaagcattctgtgaaacttgtttgtgatgtgtgtactcaactaacagagttgaacctttctttttacagagcagttttgaaacactctttttgtagaatctgcgaggggatatttggatagatttcaggatttcgttggaaaggggattatcttcatataaaatctcgacagaagcattctcagaaacttctttgtgatatctgcattcaagtcacagagttgaatattccctttcacagagtcggtttgaaacactctttttgtagtatctggaagtggacatttggagcgccttgacgcctacagtgaaaagggaaatatcttcccataaaaactagacagaagaaatctcagaatcatctttgggatatatgcacgcagctaacagagttgaacctttctattgacagagcagttttgaaacagtctttctgtggaatctgcaagtggatatttggatagcttggaggatttcgttggaaacgggattacgtataaaaagtagacagcagcatcctcagaatcttctttgtgatgtgtgcattcaagtcaaagagttgaacattccctttcgtacagcagttttgaaacactctttctgtagtatctggaagtgaacattaggacagctttcaggtctatggtgagaaaggaaatatcttcaaataaaaactagacagaaagcattctcaagaacttgtttgttatgtgtgaactcagctaacagaggtggatgtttcttttgatagagcagttctgaaaaacacgttttgttgaatctgcaagtggacatttggatagatttgaagatgtcgttggaaacgggaatatcttcatatcaaatctagacagaagcattctcagaaacgtctttgtgatgttggcattcaactcatagagttgaacattccgtttcagagagcagctttgaggcactctttttgtagtatgtgcaagtggatattttgagcgctctgaggcctacggtgaaaaagcaaatatcttcccataaccactagacagaaacattctcagaaactcctttatgacgtatgtactcaactaacagagaagaaccttctttttgacagagcatttttgatacactctttttgtagaatctccaagtggatatttggatagctgtgaagatttcgttggaaacgggaatatcttcctataaaatctagacagaagcattctcagaaactgctctgtgatgtctgcattcaagtcacagagttgaacattgcctttcatagagcaggtttgaaacgctctttttttagtatatggaagttgacgtttcggacggtttgaggcccatggtgataaagggaatatcttcccctacaagctagaaagaagcattctgtgaaacttgtttgtgatgtgtgtactcaactaacagagttgaacctttctttctacagagcagttttgaaacactctttttgtagaatctgcgaggggatatttggatagatttcaggatttcgttggaaaggggaatatcttcatataaaatctcgacagaagcattctcagaaacttctttgtgatatgtgcattcaagtcacagagttgaatattccctttcacagagtaggtttgaaacactctttttgtagtatctggaagtggacatttggagcgccttgacgcttacggtgaaaagggaaatatcttcccataaaaactagacagaagcaatctcagaatcttctttgggatatatgcacggagctaacagagttgaacctttctattgacagagcagttttgaaacagtctttctgtggaatctgcaagtggatatttggatagcttggaggatttcgttggaaacgggattacgtataaaaagtagacagcagcatcctccgaaacttctttgtgatgtgtgcattcaagtcacagagttgaacattccctttcgtacagcagtttggaaacactctttctgtagtatctggaagtgaacattaggacagctttcagctctatggtgagaaaggaaatatcttcaaataaaaactagacagaagcattctcataaacttgttcgtaatgtgtgaactcagctaacacacgtggatctttcttttgatagagcagttctgaaaaacactttttgttgaatctgcaagtgcacatttggatagatttgaagatttcgttggaaacgggaatatcttcatatcaaatctagacagaagcattctcagaaacgtctttgcgatgtttgcattcaactcatagatttgaacattccgtttcagagagcagctgtgaggcactctttttgtagtatgtgcaagtggatatttggagcgctctgaggcctacggtgaaaaagcaaatatcttcccataaccactagacagaagcattctcagaaactcctttatgaagtatgtactcaactaacagagaagaaccttccttttgacagagcagttttgatacactctttttgtagaatctgcaagtggatatttggatagctatgaagatttcgttggaaacgggaatatcttcctataaaatctagacagaagcattctcagaaactgctctgtgatgtctgcattcaagtcacagagttgaacattgcctttcatagagcaggtttgaaacgctctttttgtattatatggaagtggacttatcggacggtttgaggcccatggtgataaagggaatatcttcccctacaagctagaaagaagcattctatgaaacttgtttgtgatgtgtgtactcaactaacagagttgaacctttctttttacagagcagctttgaaacactctttttgtagaatctgcgaggggatatttggatagatttcaggatttcgttggaaacgggaatatcttcatataaaatctcgacagaagcattctcagaaacttctttgtgatatgtgcattcaagtcacagagttgaatattcgctttcacagaggaggtttgaaacactctttttgtagtatctggaagtggacatttggagcgccttgacgcctacggtgaaaagggaaatatcttcccataaaaactagacagaagcaatctcagaatcttctttgggatatatgcacgcagctaacagagttgaacctttctattgacagagcagttttgaaacagtctttctgtggaatctgcaagtggatatttggataacttggaggatttcgttggaaacgggattaagtataaaaagtagacagcagcatcctcagaaacttctttgagatgtgtgcattcaagtcacagagttgaacattccctttcgtacagcagttttgaaacactctttctgtagtaactggaagtgaacattaggacagctttcaggtctatggtgagaaaggaaatatcttcaaataaaaactagacagaagctttctgataaacttgtttgtgaagtgtgaactcagctaacagaggtggatctttcttttgatacagcagttttgaaaaacactttgttgaatctgcaagtggacatttggatagatttgatgatttcgttggaaacgggaatatcttcatatcaaatctagacagaagcattctcagaaacgtctttgtgatgtttgcattcaactcatagagttgaacattccgtttcagagaggaggtttgaagcactctttttgtagtatgtgcaagtggatatttggagcgctctgaggcctacggtgaaaaagcaaatatcttcccataaccactagacagaaacattctcagaaactcctttatgacgtatgcactcacctaacagaaaagaaccttccttttgacagagcagttttgatacactctttttgtggaatctgcaagtggatatttggatagctgtgaagatttcgttggaaacgggaatatcttcctataaaatctagacagaagcattctgtgaaacttgtttgtgatgtgtgtactcaactaacagagttgaacctttctttttacagagcagttttgaaacactctttttgtagaatctgcgaggggatatttggatacatttcagcatttcgttggaaacgggaatatcttcatataaaatgctcgacagaagcattctcagaaacttctttttgatatgtgcattcaagtcacagagttgaatattccctttcacagagtaggtttgaaacactctttttgtagtatctggaagtggacatttggagcgccttgacgcctacggtgaaaagggaaatatattcccataaaaactagacagaagcaatctcagaatcttctttgggatatatgcacgcagctaacagagttgaacctttctattgacagagcagttttgaaaaagtctttctgtggaatctgcaaatggatatttggatagcttggaggatttcgttggaaacgggattacgtataaaaagtagccagcagcattctcagaaacttcgttgtgatgtgtgcattcaagtcacagagttcaacattccctttcgtagagcaggtttgaaacactctttctctagtatctggaagtgaacgttacgagagctttcaggtctatggtgagaaagaaaatatcttcaaataaaaactagacagaagcattctcataaacttgtttgtgatgtgtgaactcaactaacagaggtggatctttcttttcatatagcagttttgaaaaacactttttgttgaatctgcaagtggacatttggatagatttgaagatttcgttggaaacgggaatatcttcatatcaaaactagacagaagcattctcagaaacgtctttgtgatgtttgcattcaactcatagagttgaacattccctttcagagagcagctgtgaagcactctttttgtagtatgtgcaagtggatatttggagcgctactgaggcctacggtgaaaaagcaaatatcttcccataaccactagacagaaacattctcagaaactcctttatgatgtatgcactcacctaacagagaagaaccttccttttgacagagcagttttgatacactctttttgtagaatctgcaagtggatatttggatagctgtgaagatttcgttggaaacgggaatatcttcctataaaatctagacagaagcattctcagaaactgctctgtgatgtctgcattcaagtcacagagttgaacattgcctttcatagagcaggtttgaaatgctctttttgtagtatatggaagtggacgtttcacacggtttgaggccgatggtgataaagggaatatcttcccctacaagctagaaagaagcattctgtgaaacttgtttgtgatgtgtgtactcaactaacagagttgaacctttctttttacagagcagttttgaaacactctttttgtagaatctgcgaggggatatttggatagatttcaggatttcgttgtaaacgagaatatcttcatataaaatctcgacagaagcattctcagaaacttctttgtgatatgtgcattcaagtcacagagttgaatattccctttcacagagtaggtttgaaacactctttttgtagtatctggaagtggacatttggagcgccttgacgcctacggtgaaaagggaaatatcttcccatacaaactagaccgaagcaatctcagaatcttctttgggatatatgcacgcagctaacagagttgaacctttctattgacagagcagttttgaaacagtctttctgtggaatctgcaagtggatatttggatagattcgaggatttcgttggaaacgggattacgtataaaaagtagacagcagcatcctcagaaacttctttgtgatgtgtgcattcaagtcacagagttgaacattccctttcgtacagcagttttgaaacactctttctgtagtatctggaagtgaacattaggacagctttcaggtctatggtgagaaaggaaatatcttcaaataacaactagacagaagcattctcatcaacttgtttgtgatgtgtgaactcagctaacagaggtggatctttcttttgatagagcagttctgaaaaacacgttttgttgaatctgcaagtggacatttggatagatttgaagatttcgttggaaacgggaatatcgtcatatcaaatctagacagaagcattctcagaaacgtctttgtgatgtttgcattcaacccatagagttgaacattccgtttcagagagcagctttgaggcactctttttgtagtatgtgcaagtggatatttggtgcgctgtgaggcctacggtgaaaaagcaaatatcttcccaaaaccactagacagaaacattctcagaaactcctttatgacgtatgcactcacctaacagagaagaaccttccttttgacagaccagttttgatacactctttttgtagaatctgcaagtggatatttggatagctgtgaagatttcgttggaaacgggaatatcttcctataaaatctagacagaagcattctcagaaactgctctgtgatgtctgcattcaagtcacagagttgaacattgcgtttcatagagcaggtttgaaactctctttttgtagtatatggaagtggacgtttcggacggtttgaggcccatggtgataaagggaatatcttcccctacaagctagaaagaagcattctgtgaaacttgtttgtgatgtgtgtactcaagtaacagagttgaacctttctttttacagagcagttttgaaacgctctttctgtagaatctgcgaggggatatttggatagatttcaggatttcgttggaaactggaatatcttcatataaaatctcgacagaagcattctcagaaacttctttgtgatatgtgcattcaagtcacagagttgaatattccctttcacagagtaggtttgaaacactctttttgtagtatctggaagtggacatttggagcgccttgacgcctacggtggaaagggaaatatcttcccataaaaactagacagaagcaatctcagaatcttctttgggatatatgcacgcagttaacagagttgaacctttctattgacagagcagttttgaaacagtctttctgtggaatctgcaaatggatatttggatagcttggaggatttcgttggaaacgggattatgtataaaaagtagacagcagcatccttagaaacttctttgtgatgtgtgcattcaagtcacagagttgaacattccctttcgtacagcagttttgaaacactctttctgtagtatctggaagtgaacattaggacagctttcagctctatggtgagaaaggaaatatcttcaaataaaaactagacagaagcattctcataaacttgtttgtgatgtgtgatctcaactaacagaggtgggtctttcttttgatacaccagttatgaaaaacccttttaattgaatctgcaagtggacatttggatagatttgaagatttcgttggaaacgggaatatcttcatatcaaatctagacagaagcattctcagaaacgtctttgtcatgtttgcattcaactcatagagttgaacattccgtttcagagagcagctttgaagcactctttttgtagtatgtgcaagtggatatttggagcactctgaggcctacggtgaaaaagcaaatatcttcccataaccactagacagaaacaatctcagaaactcctttatgacgtatgcactcacctaacagagaagaaccttccttttcacagagcagttttgatacactctttttgtagaatctgcaagtggatatttggatagctgtgaagatttcgttggaaacgagaatatcttcctataaaatctagacagaagcatgctcagaaactgctctgtgatgtctgcattcaagtcacagagttcaacattgcctttcatagagcaggtttgaaacgctctttttgtagtatatggaagtggaaatttcgagccgtttgaggcccatggtgataaaggaaatatcttcccctacaagctagaaagaagcattctgtgaaacttgtttgtgatgtgtgtactcaactaacagagttgaacctttctttttacagagcagttttgaaacactctttttgtggaatctgcgaggggatatttggatagatttcaggatttcgttggaaacgggaatatcttaatataaaatctcgacagaagcattctcagaaacttctttgtgatatctgcattcaagtcacagagttgaatattccctttcacagagtaggtttgaaacactctttgtagtatctggaagtggacatttggagcaccttgacacctacggtgaaaagggaaatatcttcccataaaaactagacagaagcaatctcagaatcttctttgggatatatgcacgcagctaaccgagttgaacctttctattaacagagcatttttgaaacagtctttctgtggaatctgcaagtggatatttggatagcttggaggatttcgttggaaacgggattacgtataaaaagtagacagcagcatcctcagaaacttctttgtgatgtgtgcattcaagtcacagatttgaacattccctttcgtacagcagttttgaaacactctttctgtagtatctggaagtgaacattaggacagctttcagctctatggtgagaaaggaaatatcttcaaataaaaactagacagaagcattctcataaacttgtttgtgatgtgtgaacgcagctaacagaggtggatctttcttttgatacagcagttttgaaaaacactttttgttgaatctgcaagtggacatttggatagatttgaagatttctttggaaacgggaatatcttcatatcaaatctagacagaagcattctcagaaacgtctttgtgatgtttgcattcaactcatagcagttgaacattccgtttcagagagcagctttgaagcactctttttgtagtatgtgcaagtggatatttggagcgctctgaggcctacggtgaaaaagcaaatatcttcccataaccactagacagaaacattctcagaaactcctttatgacgtatgcactcacctaacagagaagaaccttccttttgacagagcagttttgatacactctttttgtagaatctgcaagtggatattgggatagctgtgaagatatcgttggaaacgggaatatcttcctataaaatctagacagaagcattctcagaaactgctctgtgatgtctgcattcaagtcacagagttgaacattgcctttcctagagcaggtttgaaacgctctttttgtagtatatggaagtggacgtttcggacggtttgaggaccatggtgataaagggaatatcttcccctgcaagctagaaagaagcattctgtgaaacttgtttgtgatgtgtgtactcaactaacagagttgaacctttctttttacagagcagttttgaaacactctttttgtagaatctgcgaggggatatttggatagatttcaggatttcgttggaaacgggaatatcttcatataaaagatcgacagaagcattctcagaaacttctttgtgatatgtgcattcaagtcacagagttgaacattccctttcgtacagcagttttgaaacactctttctgtagtatctggaagtgaacattaggacagctttcagctctatggtgagaaaggaaatatcttcaaataaaaactagacagaagcattctcgtaaacttgtttgtgatgtgtgagctcagctaacagaggtggatctttcttttgatagagcagttctgaaaaacactttttgttgaatctgcaagtggacatttggatagatttgaagatttcgttggaaacgggaatatcttcatatcaaattttgacagaagcatcctcagaaacttctttttgatgtgtgcattcaagtcacagagttgaacattccctttcgtacagcagttttgaaacactctttctgtagtatctggaagtgaacattaggacagctttcaggtctatggtgagaaaggaaatatcttcaaataaaaactagacagaagcattctaataaacttgtttgtgatgtgtgaactcatctaacacaggtggatctttcttttgatagagcagttctgaaaaacactttttgttgaatctgcaagtggacatttggatagatttgaagatttcgttggaaacggcaatatcttcatatcaaatctagacagaagcattctcagaaacgtctttgcgatgtttgcattcaactcatagagttgaacattccgtttcagagagcagctttgaggcactctttttgtagtatgtgcaagtggatatttggagcgctactgaggcctacggtgaaaaagcaaatatcttcccataaccactagacagaaacattctcagaaactcctttatgatgtatgcactcacctaacagagaagaaccttccttttgacagagcagttttgatacactctttttgtagaatctgcaagtggatagttggatagctgtgaagatttcgttgcaaacgggaatatcttcctataaaatctagacagaagcattctcagaaactgctctgtgatgtctgcattcaagtcacagagttgaacactgcctttcctagagcaggtttgaaacgctctttttgtagtatatggaagtggacgtttcggacggtttgaggcccatggtgataaagggaatatcttcccctacaagctagaaagaagcattctgtgaaacttgtttgtgatgtgtgtactcaactaacagagttggacctttctttttacagagcagttttgaaacactctttttgtagaatctgtgaggggatatttggatagatttcaggatttcgttggaaacgagaatatcttcatataaaatctcgacagaagcattctcagaaacttctttgtgatatgtgcattcaagtcacagagttgaatattccctttcacagagtaggtttgaaacactctttttgtagtatctggaagtggacatttggagcgcctcgacgcctacggtgaaaagggaaatatcttcccataaaaactagacagaagcaatctcagaatcttctttgggatatatgcacgcagctaacagagttgaacctttctattgacagagcagttttgaaacagtatttctgtggaatctgcaagtggatatttggatagcttggaggatttcgttggaaacgggattacgtataaaaagtagacagcagcatcctcagaaacttctttgtgatgtgggcattcaagtcacagagttgaacattccctttcgtacatcagttttgaaacgctctttctgtagtatctggaagtgaacattaggacagctttcaggtctatggtgagaaaggaaatatcttcaaataaaaactagacagaagcattctcatcaacttctttgtgatgtgtgaactcagctaacagaggtggatctttcttttgatagagcagttctgaaaaacactttttgttgaatctgcaagtggacatttggatagatttgaagatttcgttggaaacgggaatatcttcatatcaaatctagacagaagcattctcagaaacgtctttgtgatgtttgcattcaactcatagatttgaacattccgtttcagagagcagctttgaggcactctttttgtagtatgtgcaagtggatatttggagcgctctgaggcctacggtgaaaaagcaaatatcttcccataaccactagacagaaacattctcagaaactcctttgtgacgtatgcactcaagtaacagagaagaaccttccttttgacagagcagttttgatacactctttttgtagaatctgcaagtggatatttggatagctgtgaagatttcgttggaaacgggaatatcttcctatgaaatctagacagaagcattctcagaaactgctctgtgatgtctgcattcaagtcacagagttgaacattgcctttcatagagcaggtttgaaacgctctttttgtagtatatggaagtggatgtttcggacggttggaggtccatggtgataaagggaatatcttcccctacaagctagaaagagaagcattctgtgaaacttgtttgtgatgtgtgtactcaactaacagagttgaacctttctttttacagagcagttttgaaacactctttttgtagaatctgcgaggggatatttcgatagatttcaggatttcgttggaaacgggaatatcttcatataaaatctcgacagaagcattctcaggaacttctttgtgatatctgcattcaagtcacagagttgaatattccctttcacagagtaggtttgaaacactctttttgtagtatctggaagtggacatttggagcgccttgacgcctacggtgaaaagggaaatatcttcccataaaaactagacagaagcaatctcagaatcttctttgagatatatgcacgcagctaatagagttgaacctttctattgacagagcagttttgaaacagtctttctgtggaatctgcaagtggatatttggatagcttggaggatttcgttggaaacgggattacgtataaaaaatagacagcagcatcctcagaaacttctttgtgatgtgtgcattcaagtcacagagttgaacattccctttcgtgcagcagttttgaaacactctttctgtagtatctggaagtgaacattaggacagctttcaggtctatggtgagaaaggaaatatcttcaaataaaaactagacagaagcatactcataaacttgtttgtgatgtgtgaactcagctaacaggggtggatctttcttttgatagagcagttctgaaaaacactttttgttgaatctgcaagtggacatttggatagatttgaagatttcgttggaaacgggaatatcttcatatcaaatctagacagaagcattctcagaaacgtctttgtgatgttagcattcaactcatagagttgaacattccctttcagagagcagctttgaagcactctttttgtagtatgtgcaagtggacatttggagcgctttgaggtctacggggaaaaagcaaatatcttcccataaccactagacaggaacattctcagaaactcctttatgacgtatgcacacacctaacagaaaagaaccttccttttgacagagcagttttgatacactctttttgtagaatctgcaagtggatatttggatagctgtgaagatttcgttggaaacgggaatatcttcctataaaatctagacagaagcattctcagaaactgctctgtgatgtctgcattcaagtcacagagttgaacattgcctttcatagagcaggtttgaaacgctctttttgtagtatatggaagtggacttttcggacggtttgaggcccatggtgataaagggaatatacttcccctacaagctagaaagaaagcattctgtgaaacttgtttgtgaggtgtgtactcaactaacagagttgaacctttctttttacagagcagttttgaaacactctttttgtagaatatgtgaggggatatttggatagatttcaggatttcgttggaaacgggaatatcttcatataaaatctcgacagaagcattctcagaaacttctttgtgatatgtgcattcacgtcacagagttgaatattccctttcacagagtaggtttgaaacactctttttgtagtatctggaagtggacatttggagcgccttgacacctacggtgaaaagggaaatatcttcccataaaaactagacagaagcaatctcagaatcttctttgggatatatgcccgcagctaacagagttgaacctttctattgacagagcagttttgaaacagtctttctgtggaatctgcaagtggatatttggatagcttggaggatttcgttggaaacgggattacgtataaaaagtagacagcagcatcctcagaatcttctttgtgatgtgtgcattcaagtcacagagttgaacattccctttcgtacagcagttttgaaacactctttctgtagtatctgggagtgaacattaggacagctttcaggtctatggtgagaaaggaaatatcttcaaataaaaactagacagacaagcattctcataaacttgtttgtgatgtgtgaactcagctaacaacggtggatctttcttttgatagagcagttctgaaaaacactttttgttgaatctgcaagtggacatttggatagttttgaagatttccttggaaaagggaatatcttcatatcaaatctagacagaagcattctcagaaacgtctttgcgatgtttgcattcaactcatagagttgaacattccgtttcagagagcagtttgaggcactctttttgtagtatgtgcaagtggatatttggagcgctctgaggcctacggtgaaaaagcaaatatcttcccataaccactagacagaaacattctcagaaactcctttatgacgtatgcactcacctaacagagaagaaccttccttttgacagagcagttttgatacactctttttgtagaatctgcaagtggatatttggatacctgtgaagattttgttggaaacgggaatatcttcctataaaatctagacagaagcattctcagaaactgctctctgatgtccgcattcaagtcacaggagttgaacattgcctttcctagagcaggtttgaaacgctcttttggtagtatatggaagtggacgtttcggacggtttgaggcccatggtgataaagggaatatcttcccctacaagctagaaagaagcattctgtgaaattgtttgtgatgtgtgtactcaactaacagagttgaacctttctttttacagagcagttttgaaacactctttttgtagaatctgcgaggggatatttggatagatttcaggatttcgttggaaacgggaatatcttcatataaaatctcgacagaagcattctcagaaacttctttgtgatatgtgcattcaagtcacagagttgaatattccctttcacagagtaggtttgaaacaatctttttgtagtatctggaagtggacatttggagcgccttgacgcctacggtgaaaagggaaatatcttctcataaaaagtagacagaagcaatctcagaatcttctctgggatatatgcacgcagctaacagagttgaacctttctattgacagagcagttttgaaacagtctttctgtggaatctgcaagtggatatttggatagcttggaggatttcgttggaaacgggattacgtataaaaagtagacagcagcatcctcagaaacttctttgtgatgtgtgcattcaagtcacagagttgaacattccctttcgtacagcagttttgaaacactctttctgtagtatctggaagtgaacattaggacagctttcagctctatggtgagaaaggaaatatcttcaaataaaaaccagacagaagcattctcataaacttgtttgtgatgtgtgaactcagctaacagacgtggatctttcttttgatacagcagttctgaaaaacactttttgttgaatctgcaagtggacatttggatagatatgaagatttcgttgggaaacgggaatatcttcatatcaaatctagacagaagcattctcagaaacgtctttgtgatgattgcattcaactcatagagttgaacattccgtttcagagagcagctttgaagcactctttttgtagtatgtgcaagtggatatttggagcgctctggggcctacggtgaaaaagcaaatatcttcccataaccactagacagaaacattctcagaaactcctttatgacgtatgtactcaactaacagagaagaaccttccttttgacagagcagttttgatccactctttttgtagaatctgcaagtggatatttggatagctgtgaaggtttcgttagaaacggaaatatcttcctataaaatctagacagaaagcattctcagaaactgctctgtgatgtctgcattcaagtcacagagttgaacattgcctttcatagagcaggtttgaaacgctctttttgtagtatattgaagtggacgtttcggacggtttgaggcccatggtgataaagggaatatcttcccctacaagctagaaagaagcattctgtgaaacttgtttctgatgtgtgtactcaagtaacagagttgaacctttctttttacagagcagttttgaaacactctttctgtagaatctgcgaggggatatttggatagatttcaggatttcgttggaaacgggaatatcttcatataaaatctcgacagaagcattctcagaaacttctttgtgatatgtgcattcaagtcacagagttgaatattccctttcacagagtaggtttgaaacactctttttgtagtatctggaggtggacatttggagcgccttgacgcctacggtgaaaagggaaatatcttcccataaaaactagacagaagcaatctcagaatcttctttgtgatatatgcacgcagctaacagagttgaacctttctattgacagagcagttttgaaacagtctttctgtggaatctgcaagtggatatttggatagcttggaggatttcgttggaaacgggattacgtataaaaagtagacagcagcatcctcagaaacttctttgtgatgtgtgcattcaagtcacagagttgaacattcccttttgtacagcagttttgaaacactctttctgtagtatctggaagtgaacattaggacagctttcaggtctatggtgagaaaggcaatatcttcaaataaaaactagacagaagcattctcataaacttgtttgtgatgtgtgaactcacctaagagacgtggatctttcttttgatagagcagttctgaaaaacactttttgttgaatctgcaagtggacatttggatagatttgaagatttcgttggaaacgggaatatcttcatatcaaatctagacagaagcattctcagaaacgtctttgtcatgtttgcattcaactcatagagttgaacattccctttcagagagcagctttgaagcactctttttgtagtatgtgcaagtggacatttggagcgctttgaggcctacggggaaaaagcaaatatcttcccataaccactagacaggaacattctcagaaactcctttatgacgtatgtactcaactaagagagaagaaccttccttttgacagagcagttttgatacactctttttgtagaatctgcaagtggatatttggatagctgtgaagatttcgttggaaacgggaatatcttcctataaaatctagacagaagcattctcagtaaactgctctgtgatgtctgcattcaagtcacagagttgaacattgcctttcatagagcaggtttgaaacgctctttttgtagtatatggaagttgacgtttcggacggtttgaggcccatggtgataaagggaatatcttcccctacaagctagaaagaagcattctgtgaaacttgtttgtgatgtgtgtactcaagtaacagagttgaacctttctttttacagagcagttttgaaacactctttttgtagaatctgcgaggggatatttggatagatttcaggatttcgttggaaacgggaatatcttcacataaaatctcgaaggaagcattctcagaaacttctttgtgatatgtgcattcaagtcacagagttgaatattccctttcacagagtaggtttgaaacactctttttgtagtatctggaagtggacatttgtagcgccttgacacctacggtgaaaagggaaatatcttcccataaaaactagacagaagcaatctcagaatcttctttgggatgtatgcacccagctaacagagttgaacctttctattgacagagcagttttgaaacagtctttttgtggaatctgcaagtggatatttggatagcttggaggatttcgttggaaacgggattacgtataaaaagtagacagcagcatcctcagaatcttctttgtgatgtgtgcattcaagtcaaagagctgaacattccctttcgtacagcagttttgaaacactctttctctagtatctggaagtgaacattaggacagctttcaggtctatggtgagaaaggaaatatcttcaaataaaaactagacagaagcattctcataaacttgtttgtgatgtgtgaactcagctaacagaggtggatctttcttttgatagagcagttctgaaaaacacattttgttgaacctgcaagtggacatttggatagatttgaagatttcgttggaaacgggaatatcttcatatcaaatctagacagaagcattctcagcaaacgtctttgtgatgtttgcattcaactcatagagttgaacattccgtttcagagagcagctttgaagcactctttttgtagtatgtgcaagtggatattttgagcgctctgaggcctacggtgaaaaagcaaatatcttcccataaccactagacagaaacattctcagaaacttctttatgacgtatgtactcaactagcagagaagaactttccttttgacagagcacttttgatacactctttttgtagtatctgcaagtggatatttggatagctgtgaagatttcgttggaaacgggaatatcttcctataaagtctggacagaagcattctcagaaactgctctgtgatgtctgcattgaagtcacagagttgaacattgcctttcatagagcaggtgtgagacgctctttttgtagtatatggaagtggacgtttcggacggtttgaggcccatggtgataaagggaatatcttcccctacaagctagaaagaagcattctgtgaaacttgtttgtgatgtgtgtactcaactaacagagttgaacctttctttttacagagcagttttgaaacactctttttgtagaatctgcgaggggatatttggatagatttcaggatttcgttggaaacggggatatcttcatataaaatctcgacagaagcattctcagaaacttctttgtgatatctgccttcaagtcacagagttgaatattccctttcacagagtaggtttgaaacactctttttgtagtatccggaagtggacatttggagcgccttgacgcctacggtgaaaagggatatatcttcccataaaaactagacagaagcaatctcagaatcttctttgggatatatgcacgcagctaacagagttgaacctttctattgacagagcagttttgaaacagtctttctgtggaatctgcaagtggatatttggatagcttggaggatttcgttggaaacgggattacgtataaaacgtagacagcagcatcctcagaaacttctttgtgatgtgtgcattcaagtcacagagttgaacattccctttcgtacagcagttttgaaacgctctttctgtagtatctggaagtgaactttaggacagctttcaggtctatggtgagaaaggaaatatcttcaaataaaaactagacagaagcattctcataaacttgtttgtgatgtgtgaactcagctaacagaggtggatctttcttttgagagagcagttctgaaaaacactttttgttgaatctgcaagtggacatttggatagatttgaagatttcgttggaaacgggaatatcttcatatcaaatctagacagaagcattctcagaaacgtctttgtgatgtttgcattcaactcatagagttgaacattccgtttcagagagcagctttgaagcactctttttgtagtatgtgcaagtggatatttggatcgctgtgaggcctaaggtgaaaaagcaaatatcttcccataaccactagacagaaacattctcagaaactcctttatgacgtatgcactcacctaacagaaaagaaccttccttttgacagagcagttttgatacactctttttgtagaatctgcaagtggatatttggatagctgtgaaggtttcgttggaaacgggaatatcttcctataaaatctagacagaagcattctcagaaactgctctgtgatatctgcattcaagtcacagagttgaacattgcctttcctagagcaggtttgaaacgctctttttgtagtatatggaagtggacgtttcggacggtttgaggcccatggtgataaagggaatatcttcccctacaagctagaaagaagcattctgtgaaacttgtttgtgatgtgtgtactcaactaagagagttgaacctttcttttcacagagcagttttgaaacactctttttgtagaatctgcgaggggatatttggatagatttcaggatttcattggaaacgggaatatcttcatataaaatctcgacagaagcattctcagaaacttctttgtgatatgtgcattcaagtcacagagttgaatattccctttcacagagtaggttcgaaacactctttttgtagtatctggaagtggacatttggagcgccttgacgcctacggtgaaaagggaaatatcttcccataaaaactagacagaaacaatctcagaatcttctttgggatatatgcacgcagctaacagagttgaacctttctattgacagagcagttttgaaacagtctttctgcggaatctgcaagtggatatttggatagcttggaggatttcgttggaaacgggattaggtataaaaagtagacagcagcctcctcagaaacttctttgtgatgtgtgcattcaagtcacacagttgaacattccctttcgtacagcagttttgaaacactctttctgtagtatctggaagtgaacattaggacagctttcaggtctatggtgagaaaggcaatatcttcaaataaaaactagacagaagcattctcataaacttgtttgtgatgtgtgaactcagctaacagaggtggatcgttcttttgatagagcagttctgaaaaacactttttgttgaatctgcaagtggacatttggatagatttgaagatttcgttggaaacgggaatatcttcatatcaaatctagacagaagcattctcagaaacgtctttgtgatgtttgcattcaactcatagagttgaacattcactttcagagagcagctttgaagcactctttttgtagtatgtgcaagtggatattttgatcgctctgtggcctacggtgaaaaagcaaatatcttcccataaccactagacagaaacattctcagaaactaatttatgacgtatatactcaactaacagagaagaaccttccttttgacagagcagttttgatacactctttttgtaggatctgcaagtggatatttggatagctgtgaagatttcgttggaaacgggaatatcttcctataaaatctagacagaagcattctcagaaactgctctgtgatgtctgcattcaagtcacagagttgaacattgcctttcatagagcaggtttgaaatgctctttttgaagtatatggaagtggacgtttcagacggtttgaggcccatggtgataaagggaatatcttcccctacaagctagaaagaagcattctgtgaaacttgtttgtgatgtgtgtactcaactaacagagttgaacctttcttttcacagagcagttttgaaacactctttttgtagaatctgcgaggggatatttggatagatttcagcatttggttggaaacgggaatatcttcatgtaaaatctcgacagaagcattctcagaaacttccttgtgatatgtgcattcaagtcacagacttgaatattccctttcacagagtaggtttgaaacactctttttgaagtatctggaagtggacatttggagcgccttgacgcctacggtgaaaagggaaatatcttcccataaaaactagacagaagcaatctcagaatcttctttgggatatatacacgcagctaacagagttgaacctttctattgacagagcagttttgaaacagtctttctgtggaatctgcaagtggatatttggatagcttggaggatttcgttggaaacgggattaagtataaaaagtagacagcagcatcctcagaaacttctttgtgatgtgtgcattcaagtcacagagttgaacattccctttcgtacagcagttttgaaacactctttctgtagtaactggaagtgaacattaggacagctttcaggtctatggtgagaaacgaaatatcttcaaataaaaactagacagaagcattctcgtaaacttgtttgtgatgtgtgaacccagctaaaagaggtggatctttcttttgatagagcagttctgaaaaacactttttgttgaatctgcaagtggacatttggatagatttgaagatttcgttggaaacgggaatatcttcatatcaaatctagacagaagcattctcagagacgtctttgtgatgtttgcattcaactcatagagttgaacattccctttcagagagcagctttgaagcacactttttgtagtatgtgcaagtggatatttggagcgctatgaggcctacggtgaaaaagcaaatatcttcccataaccactagacagaaacattctcagaaactcctttatgacgtatgtactcaactaacagagaagaaccttccttttgacagagcagttttgatagactctttttgtagaatctgcaagtggatatttggatagctgtgaagatttcgttggaaacgggaatatcttcctataaaatctagacagaagcattctcagaaactgctctgtgatgtctgcattcaagtcacagagttgaacattgcctttcatagagcaggtttgaaacgctctttttgtagtatatggaagtagacgtttcagacggtttgaggcccttggtgataaagggaatatcttcccctacaagctagaaagaagcattctgtgaaacttgtttgtgatgtgtgtactcaactaacagagttgaacctttctttttacagagcagttttgaaacactctttttgtagaatctgcgaggggatatttggatagatttcaggaatttgttggaaaccgtaatatctttatataaaatctcgacagaagcattctcagaaacttctttgtgatatctgccttcaagtcacagagttgaatattccctttcgcagagtaggtttgaaacactctttttgtagtatctggaagtggacatttggagctccttgacacctacggtgaaaagggaaatatcttcccataaatactagacagaagcaatctcagaatcttctttgggatatatgcacgcagctaacagagttgaacctttctattgacagagcagttttgaaacagtctttctgtggaatctgcaagtggatatttgtatagcttggaggattttgttggaaacgggattacgtataaaaagtagacagcagcatcctcagaaacttctttgtgatgtgtgcattcaagtcacagagttgaacattccctttcatgcagcagttttgaaacactctttctgtagtatctggaagtgaacattaggacagctttcaggtctatggtgagaaaggaaatatcttcaaataaaaactagacagaagcattctcataaagttctttgtgatgtgtggactcaactaacagaggtggatctttcttttgatacagcacttttgaaaaacactttttgttgaatctgcaagtggacatttggatagattggaagatttcgttggaaacgggaatatcttcatatcaaatctagacagaagcattctcagaaacgtctttgtgatgttttcattcaactcatagagttgaacattccgtttcagagagcagctttgaggcactctttttgtagtatgtgcaagtggatatttggagcgctctgaggcctacggtgaaaaagcaaatatcttcccataaccactagtcagaaacattcttagaaactcctttatgacgtatgtactcaactaacagagaagaaccttccttttgacagagcagttttgatacactctttttgtagaatctgcaagtgcatatttggatagctgtgaagatttcgttggaaacgggaatatcttcctataaaatctagacagaagcattctcagaaactgctctgtgatgtctgcattcaagtctcagagttgaacattgcctttcatagagcaggtttgaaacgctctttttgtagtatatggaagtagacgtttcggacggtttgaggcccatggtgataaagggaatatcttcccctacaagctagaaagaagcattctgtgaaacttgtttgtgatgtgtgtactcaactaagatagttgaacctttcttttcacagagcagttttgaaacactctttttgtagaatctgcgaggggatatttggatagatttcaggatttcgttggaaacgggaatatcttcatacaaaatctcgacagaatcattctcagaaacttctttgtgatatctgcattcaagtcacagagttgaatattccctttcacagagtaggtttgaaacactctttttgtagtatctggaagtggacatttggagcgccttgacacctacggtgaaaagggaaatatcttcccataaaaactagacagaagcaatctcagaatcttctttgggatatatgcacgcagataacagagttgaacctttctattgacagagcagttttgaaacagtctttctgtggaatctgcaagtggatatttggatagcttggaggatttcgttggaaacgggattacgtataaaaagtagacagcagcatcctgagaaacttctttgtgatgtgtgcattgaagtcacagagttgaacattctctttcgtacagcagttttgaaacactctttctgtagtatctggaagtgaacattaggacagctttcaggtctatggtgagaaaggaaatatcttcaaataaaaactagacagaagcattctcataaacttgtttgtgatgtgttaactcagctaacagaggtggatctttcttttgatagagcagttctgaaaaacactttttgttgaatctgcaagtggacatttggatagatttgaagatttcgttggaaacgggtatatcttcatatcaaatctagacagaagcattctcagaaacgtctttgtcatgtttgcattcaactcatagagttgaacattccgtttcagagagcagctttgaagcactctttttgtagtatgtgcaagcggatatttggagcgctactgaggcctacggtgaaaaagcaaatatcttcccataaccactagacagaaaacattctcagaaacttctttatgacgtatgtactcaactagcagagaagaactttccttttgacagagcatttttgatacattctttttgtagtatctgcaagtggatatttggatagctgtgaagatttccttggaaacgggaatatcttcctataaagtctggacagaagcattctcagaaacagctctgtgatgtctgcattcaagtcacagagttgaacattgcctttcatagagcaggtttgaaacgctctttttgtagtatattgaagtggacttttcggacggtttgaggcccatggtgataaagggaatatcttcccctacaagctagaaagaagcattctgtgatacttgtttgtgatgtgtgtactcaactaacagagttgaacctttctttttaaagaacagttttgaaacactctttttgtagaatctgcgaggggatatttggatagatttcaggatttcgttggaaacgggaatatcttcatataaaatctcgacagaagcattctcagaaacttccttgtgatatgtgtattcaagtcacagagttgaatattccctttcacagagtaggtttgaaacactctttttgtagtatctggaagtggacatttggagcgccttgacgcctacggtgaaaaaggaaatatcttcccataaaaactagacagaagcaatctcagaatcttctttgggatatatgcacggagctaacagagttgaacctttctattgacagagcagttttgaaacagtctttctgtggaatctgcaagtggatatttggatagcttggaggttttctttggaaacgggattacgtataaaaagtagactgcagcatcctcagaaacttctttgtgatgtgtgcattcaagtcacagtgttgaacattccctttcgtacagcagttttgaaacactctttctgtagtatctggaagtgaacattaggacagctttcaggtctatggtgagaaaggaaatatcttcaaataaaaacaagacagaaggcattctcataaacttgtttgtgatgtgtgaactcagctaacagaggtgtatctttcctttgatagagcagttctgaaaaacacgttttgttgaatctgcaagtggacattttgatagatttgaagatttcgttgcaaacgggaatatcttcatatcaaagctagacagaagcattctcagaaacgtctttgcgatgtttgcattcaactcatagtgttgaacattccctttcagagagcagctttgaggcactctttttgtagtatgtgcaagtggatatttggagcgctctgaggcctacggtgaaaaagcaaatatcttcccataaccactagacagaaacattctcagaaactcctttatgacgtatgcactcacctaacagagaagaaccttccttttgacagagcagttttgatacactctttttgtagaatctgtaagtggatatttggatagctgtgaagattttgttggaaacgggaatatcttcctataaaatctagacagaagcattctcagaaactgctctgtgatgtctgcattcaagtcacagagttgaacattgcctttcatagagcaggtttgaaacgctctttttgtagtatatggaagtggacgtttcggacggtttgaggcccatggtgataaagggaatatcttctctctacaagctagaaagaagcattctgtgaaacttgtttgtgatgtgtgtactcaactaacagagttgaacctttctttttacagagcagttttgaaacactctttttgtagaatctgcgatgggatatttggatagatttcaggatttcgttggaaaggggaatatcttcatataaaatctcgacagaagcattctcagaaacttctttgtgatatgtgcattcaagtcacagagttgaatattccctttcacagagtaggtttgaaacactctttttgtagtatctggaagtggacatttggagcgccttgacgcctacggtgaaaaggaaaatatcttcccataaaaactagacagaagcaatctcagaatcttctttgggatatatgcacgtagctaacagagttgaacctttctattgacagagcaggtttgaaacagtctttctgtggaatctgcaagtggatatttggatagcttcgaggatttcgttggaaacaggattacgtagaaaaagtagacagcagcatcctcagaaacttccttgtgatgtgtgcattcaagtcacagagttgaactttccctttcgtacagcagttttgaaacactctttctgtagtatctggaagtgaacattaggagagctttcaggtctatagtgagaaaggatatatcttcaaataaaaactagacagaagcattctcataaacttgtttgtgatgtgtgaactcagctaacagaggtggatctttcttttgatagagcagttgtgaaaaacactttttgttgattatgcaagtggacatttggatagatttgaagatttcgttggaaacgggaatatcttcatatcaaatctagacagaagcattctcagaaacgtctttgtgatgtttgcattcaactcatagagttgaacattccgtttcagagagcagctttgaggcactctttttgtagtatgtgcaagtggatatttggagcgctctgaggcctacggtgaaaaagcaaatatcttcccatagccactagacagaaacattctcagaaactcctttatgacgtatgcactcaactaacagagaaaaaccttccttttgacagagcagttttgatacactctttttgtagaatctgcaagtggatatttggatagctgtgaagttttcgatggaaacgggaatatcttcctataaaatctagacagaagcattctcagaaactgctctgtgatgtctgcattcaagtcacagagttgaacattgcctttcctagagcaggtttgaaatgctgtttttgtagtatatggaagtggacgtttcggacggtttgaggcccatggtgataaagggaatatcttcccctacaagctagaaagaagcattctgtgaaacttgtttgtgatgtgtgtactcaactaacagagttgaacctttctttttacagagcagttttgaaacactctttttgtagaatctgcgaggggatattcggatagatttcaggatttcgttggaaacgggaatatcttcatataaaatctcgacagaagcattctcagaaacttctttgtgatatgtgcattcaagtcacagagttgaatattccctttcacagagtaggtttaaaacactctttttgtagtatctggaagtggacatttggagcgccttgacacctacggtgaaaagggaaatatcttcccataaaaactagacagaagcaatctcagaatcttctttgggatatatgcacgcagctaacagagttgaacctttctattgactgagcagatttgaaacagtctttctgtggaatctgcaagtggatatttggatagcttggaggatttcgttggaaacgggattacgtataaaaagtagacagcagcatcctcagaaacttctttgtgatgtgtgcattcaattcacagagttgaacattccctttcatacagcagttttgaaacactctttctgtagtatctggaagtgaacattaggacagctttcaggtctatggtgagaaaggaaatatcttcaaataaaaactagacagaagcattctcataaacttgtttgtgatgtgtgaactcagcttacagaggtggatctttcttttgatagagcagttctgaaaaactcttttgttgaatctgcaagtggacatttggatagatttgaagatttcgttggaaacgggaatatcttcatatcaaatctagacagaagcattctcggaaacgtctttgtgatgtttgcattcaactcatagaattgaacattccgtttcagagagcagctttgaggcactcattttgtagtatgtgcaagtggatatttggagcgctctgaggccttcggtgaaaaagcaaatatcttcccataaccactagacagaaactttctcagaaactcctttatgacgtatgcactcacctaacagagaagaaccttccttttgacagagcagttttgatacactctttttgtagaatctgcaagtggatatttggatagctgtgaagatttcgttggaaacgggaatatcttcctataaaatctagacagaagcattctcagaaactgctctgtgatgtctgcattcaagtcacagagttgaacattccctttcctagagcaggtttgaaacgctcttcttgtagtatatggaagtggacgtttcggatggtttgaggcccatggtgataaagggaatatcttcccctacaagctagaaagaaacattctcagaaactcctttatgacgtatgcactcacctaacagagaagaaccttccttttgacagagcagttttgatacactctttttgtagaatctgcaagtggatatttggatagctgtgaagattttgttggaaacgggaatatcttcctataaaatctcgacagaagcattctcagaaacttctttgtgatatctgcctttaagtcacagagttgaatattccctttcacagagtaggtttgaaacactctttttgtagtatctggaagtggacatttggagctccttgacacctacggtgaaaagggaaatatcttcccataaaaactagacagaagcaatctcagaatcttctttgggatatatgcacgcagctatcagagttgaacctttctattgacagagcagttttgaaacagtctttctgtggaatctgcaagtggatatttggatagcttggaggatttcgttggaaaagggattatgtataaaaagtagacagcagcatcctcagaaacttctttgtgatgtgtgcattgaagtcacagagttgaacattccctttcgtacagcagttttgaaacactctttctgtagtacctggaagtgaacattaggacagctttcaggtctatggtgagaaaggaaatatcttcaaataaaaactagacagaagcattctcataaacttgttcgtgatgtgtgaactcagctaacacacgtggatctttcttttgatagagcagttctgaaaaacactttttgttgaatctgcaagtggacatttggatagatttgaagatttcgttgcaaacgggaatatcttcatatcaaatctagacagaagcattctcagaaacgtctttgtgatgtttgcattcaactcatagatttgaacattccgtttcagagagcagctttgaagcactctttttgtagtatgtgcaaggggatatttggagcgctctgaggcctatggtgaaaaagcaaatatcttcccataaccactagacagaaacattctcagaaactcctttatgacgtatgcactcacctaacagaaaagaaccttccttttgacagagcagttttgatacactctttttgtagaatctgcaagtggatatttggatagctgtgaagatttcgtaggaaacgggaatatcttcctataaaatctagacagaagcattctcagaaactgctctgagatgtctgcattcaagtcacagagttgaacattgcctttcctagagcaggtttgaaacgctctttttgtagtatatggaagtggacgtttcggacggtttgaggcccatggtgataaagggaatatcttcccctacaagctagaaataagcattctgtgaaacttgtttgtgatgtgtgtacacaactaacagagttgaacctttctttttacagagcagttttgaaacactctttttgtagaatctgcgaggggatatttggatagatttcaggatttcgttggaaacgggactatcttcatataaaatctcgacagaagcattctcaggaacttctttgtgatatctgcactcaagtcacagagttgaatattccctttcacagagtaggtttgaaacactctttttgtagtatctggaagtggacatttgtagctccttgacacctacggtgaaaagggaaatatcttcccataaaaactagacagaagcaatctcagaatcttctttgggatatatgcacgcagctaacagagttgaacctttctattgacagagcagttttgtaacagtctttctgtggaatctgcaagtggatatttggatagcttggaggatttcgttggaaacgggattacgtataaaaagtagacagcagcatcctcaaaaacttctttgtgatgtgtgcattcaagtcacagagttgaacattccctttcgtacagcagttttgaaacactctttctgtagtaactggaagtgaacattaggacagctttcaggtctatggtgagaaaggaaatatcttcaaataaaaactagacagaagcattctcataatcttgtttgtgatgtgtgaactcagctaacacacgtggatctttcttttgatacagcagttttgaaaaacactttttgttgaatctgcaagtggacatttggatagatatgaagatttcgttggaaacgggaatatcttcatatcaaatctagacagaaagcattctcagaaacgtctttgtgatgtttgcattcaacccatagagttgaacattccgtttcagagagcagctttgaggcactctttttgtagtatgtgcaagtggatatttggtgcgctgtgaggcctacggtgaaaaagcaaatatcttcccaaaaccactagacagaaacattctcagaaactccgttatcacgtatgcactcacctaacagagaagaaccttccttttgactgagcagttttgatacactctttttgcagaatctgcaagtggatatttggatagctgtgaagatttcgttggaaacgggaatatcttcctataaaatctagacagaagcattctcagaaactgctctgtgatgtctgcattcaagtcacagagttgaacattgcctttcatagagcaggtttgaaacgctctttttgtactatatggaagtggatgtttcggacggttggaggcccatggtgataaagggaatatcttcccctacaagctagaaagaagcattctgtgaaacttgtttgtgatgtgtgtactcaactaacagagttgaacctttctttttacagagcagttttgaaacactctttttgtagaatctgcgaggggatatttggatagatttcaggatttcgttggaaacttgaatatcttcatataaaatctcgacagaagcattctcagaaacttctttgtgatatgtgcattaaagtcacagagttgaatattccctttcacagagtaggtttgaaacactctttttgtagtatctggaagtggacatttggagcgccttgacgcctacggtgaaaagggaaatatcttcccataaaaactagacagaagcaatctcagaatcttctttgggatatatgcacgcagctaacagagttgaacctttctattgacagagcagttttgaaacagtctttctgtggaatctgcaagtggatatttggatagcttcgaggatttcgttggaaacgggattacgcataaaaagtagacagcagcatcctcagaaacttatttgtgaggtgtgcattcaagtcacagagttgaacattccctttcgtacagcagttttgaaacactgtttctgtagtatctggaagtcaacattaggacagctttcaggtctatggtgagaaaggaaatatcttcaaataaaaactagacagaagcattctcataaacttgtttgtgatgtctgaactcagctaacagaggtggatctttcttttgatagagcagttctgaaaaacactttttgttgaatctgcaagtggacatttggatagatttgaagatttcgttggaaacgggaagatcttcatatcaaatctagacagaagcgttctcagatacgactttgtgatgtttgcattcaactcatagaggtgaacactccctttaagagagcagctttgaagaactctttttgtagtatgtggaagtggacatttggagcgctatgaggcctatggtgaaaaagcaaatatcttcccataaacactagacagaaacattctcagaaactcctttatgacgtatgcactcacctaacagaaaagaaccttccttttgacagagcagttttgatacactctttttgtagaatctgcaagtggatatttggatagctgtgaagatttcgttggaaacgtgaatatcttcctataaaatctagacagaagcattctcagaaactgctctgtgatgtctgcattcacgtcacagagttgaacattgcctttcatagagcaggtttgaaacactctttttgtagtatatggaagtggacgtttcggacggtttgaggcccatggtgataaagggaatatcttcccctacaagctagaaagaagcattctgtgaaacttgtttgtgatgtgtgtactcaactaacagagttgaacctttctatttacagagcagttttgaaacactctttttgtagaatctgcgaggggatatttggatagatttcaggatttcgttggaaacgggaatatcttcatataaaatctcgacagaagcattctcagaaacttcattgtgatatgtgcattcaagtcacagagttgaatattcccttttacagagtaggtttgaaacactctttttgtagtatctggaagtggacatttggagcgctttgacgcctacggtgaaaagggaaatatcttctcataaaaactagacagaagcaatctcagaatcttctttgggatatatgcacgcagctaacagagttgaacctttctattgacagagcagttttgaaacagtctttctgtggaatctgcaagtggatatttggatagattggaggatttctttggaaacgggattacgtataaaaagtagacagcagcatcctcagaaacttctttgtgatgtgtgcattcaagtcacagagttgaacattccctttcgtacagcagttttgaaacactctttctgtagtatctggaagtgaacgttaggacagctttcaggtctatggtgagaaaggaaatatcttcaaataaaaactagacagaagcattctcataaacttgtttgtgatgtgtgaactcagctaacagacgtggatctttcttttgatacagcagttttgaaaaacactttttgttgaatctgcaagtggacatttggatatatttgaagatttcgttggaaacgggaatatcttcatatcaaatctagacagaagcattctcagaaacgtctttgtcatgtttgcattcaactcatagagttgaacattccctttcagagagcagctttgaaacactctttttgtcgtatgtgcaagtggatatttggagcgctctgaggcctacggtgaaaaaacaaatatcttcccataaccactagacagaaacattctcagaaactcctttatgacgtatgcactcacctaacagagaagaaccttccttttgacagagcagttttgatacactctttttgtagaatctgcaagtggatatttggatagctgtgaagatttcgttggaaacgggaatatcttcctataaaatgtagacagaagcattctcagaaactgctctgtgatgtctgcattcaagtcacagagttgaacattgcctttcatagagcaggtttgaaacgctctttttgtagcatatggaagtggacgtttcggacggtttgaggcccatggtgataaagggaatatcttcccctacaagctagaaagaagcattctgtgaaacttgtttgtgatgtgtgtactcaactaacagagttgaacctttctttttacagagcagttttgaaacactctttttgtagaatctgcgaggggatatttggatagatttcaggatttcgttggaaacgggcatatcttcatataaaatctcgacagaagcattctcagaaacttctttgtgatatgtgcattcaagtcacagagttgaatattccctttgacagagtaggtttgaaacactctttttgtagtatctggaagtggacatttggagcgccttgacacctacggtgaaaagggaaatatcttcccataaaaactagacagaagcaatctcagaaacttctttgggatatatgcacgcagctaacagagttgaacctttctattgacagagcagttttgaaacagtctttctgtggaatctgcaagtggatatttggatagcttggaggatttcgttggaaacgggattacgtataaaaagtagacagcagcatcctcagaaacttctttgtgatgtgtgcattcaagtcacagagttgaatattccctttcacagagtaggtttgaaacactctttttgtagtatctggaagtggacatttggagcgccttgacgcctacggtgaaaagggaaatatcttcccataaaaactagacagaagcattctcataaacttgtttgtgatgtgtgaactcagctaacagaggtggatctttcttttgatagagcagttctgaaaaacactttttcttgaatctgcaagtggacatttggatagatttgaagatttcgttggaaacgggaatatcttcatatcaaatctagacagaagcattctcggaaacgtctttgtcatgtttgcattcaactcatggagttgaacattccgtttcagagagcagctttgaagcactctttttgtagtatgtgcaaggggatatttggagcgctctgaggcctaaggtgaaaaagcaaatatcttcccataaccactaaacagaaacaatctcagaaacttctttatgacgtatgtactcaactagcagagaagaactttccttttgacagagcatttttgatacactctttttgtagtatctgtaagtggatatttggatagctgtgaagatttcgttggaaacgggaatatcttcctataaagtctggacagaagcattctcagaaactgctctgtgatgtctgcattcaactcacagagttgaacattgcctttcatggagcaggtttgaaatgctctttttgtagtatatggaagtggacgtttcagacggtttgaggcccatggtgataaagggaatatcttcccctacaagctagaaagaagcattctgtgaaacttgtttgtgatgtgtgtactgaactaacagagttgaacctttctttttacagagcagttttgaaacactctttttgtagaatctgcgaggggatatttggatagatttcaggatttcgttggaaacgggaatatcttcacataaaatctcgacagaggcattctcagaagcttctttgtgatatgtgcattcaagtcacagagttgaatattccctttcacagagtaggtttgaaacactctttttctagtatctggaagtggacatttggagcgccttgacacctacggtgaaaagggaaatatcttctcataaaaagtagacagaagcaatctcagaatcttctttgggatatatgcacgcagctaacagagttgaacctttctattgacagagcagttttgaaagagtctttctgtggaatctgcaagtggatatttggatagcttggaggatttcgttggaaacgggattacgtataataagtagacagcagcatcctccgaaacttctttgtgatgtgtgcattcaagtcacagagttgaacattccctttcgtacagcagttttgaaacactctttctgtagtatctggaagtgaacattaggacagctttcagctctatggtgagaaaggaaatatcttcaaataaaaactagagagaagcattctcataaacttgtttgtgatgtctgaactcagctaacagacgtggatctttcttttgatagagcagttctgaaaaacacgttttgttgaatctgcaagtggacatttggatagatttgaagatttcgttggaaacgggaatatcttcatatcaaatctagacagaagcattctcagaaacgtctttgtgatgtttgcattcaactcatagagttgaacattccgtttcagagagcagctttgaagcactctttttgtagcatgtgcaagtggatatttggagcgctctgaggcctacggtgaaaaagcaaatatcttcccataaccactagacagaaacattctcagaaactcctttatgacgtgtgcactcacctaacagagaagaaccttcctttttacagagcagttttgatacactctttttgtagaatctgcaagtggatattgggatagctgtgaagatttcgttggaaacggtaatatcttcctataaaatctagacagaagcattctcagaaactgctctgtgatgtctgcattcaagtcacagagttgaacattgcctttcatagagcaggtttgaaacgctctttttgtagtatatggaagtggatgtttcggacggttggaggcccatggtgataaagggaatatcttcccctccaagctagaaagaagcattgtgtgaaacttgtttgtgatgtgtgtactcaactaacagagttgaacctttctttttacagagcagttttgaaacactctttttgtagaatctgcgaggggatatttggatagatttcaggatttcgttggaaacgggaatatcttcatataaaatctcgacagaagcattctcagaaacttctttgtgatatgtgcattcaagtcacagagttgaatattccctttcacagagtaggtttgaaacactctttttgtagtatctggaagtggacatttggagcgccatgacacctacagtgaaaagggaaatatcttcccataaaaactagacagaagtaatctcagaatcttctttgggatatatgcacgcagctaacagagttgaacctttctattgacagagcagttttgaaacagtctttctgtggaatctgcaagtggatatttggatagcttggaggatttcgttggaaacgggattacgtataaaaagtagacagcagcatcctcagaaacttctttgtgatgtgtgcattcaagtcacagagttgaacattccctttcgtacagcagttttgaaacactctttctgtagtatctggaagtgaacattaggacagctttcaggtctatggtgagaaaggaaatatcttcaaataaaaactagacacaagaattctgataaacttgtttgtgaagtgtgaactccgctaacagagtttgatctttcttttgatacagcagttttgaaaaacactttgttgaatctgcaagtggacatttggataaatttgaagatttcgttggaaacgggaatatcttcatatcaaatgtagacagaaacattctcagaaacgtctttgtgatgtttgcattcaactcatagagttgaacattcactttcagagagcagctttaaagcactctttttgtagtatgtgcaagtggatatttggagcgctctgaggcctacggggaaaaagcaaatatcttcccataaccactagacagaaacattctcagaaactcctttatgacgtatgtactcaactaacagagaagaaccttccttttgacagagcagttttgatacactctttttgtagaatctgcaagtggatatttggatagctgtgaagatttcgttggaaatgggaatatcttcctataaaatctagacagaagcattctcagaaactgctctgtgatgtctgcattcaagtcacagagttgaacattgcctttcatagagcaggtttgaaacgctctttttgtagtatatggaagtagacgtttcggacggtttgaggcccatggtgataaagggaatatctgcccctacaagctagaaagaagcattctgtgaaacttgtttgtgatgtgtgtactcaactaacagagttgaacctttctttttacagagcagttttgaaacactctttttgtagaatctgcgaggggatatttggatagatttcaggatttcgttggaaacgcgaatatcttcatcgaaaatctcgacagaagcattctcagaaacttccttgtgatatgtgcattcaagtcacagagttgaatattccctttcacagagtaggtttgaaacactctttttgtagtatctggaagtggacatttggagcgccttgacgcctacggtgaaaaggaaaatatcttcccataaaaactagacagaagcaatctcagaatcttctttgggatatatgcacacagctaacagagttgaacctttctattgacagagcagttttgaaacagtctttctgtggaatctgcaagtggatatttggatagattggaggatttcgttggaaacgggattacgtataaaaagtagacagcagcatcctcagaaacttccttgtgatttgtgcattccagtcacagagttgaactttccctttcgtacagtagttttgaaacactctttctgtagtatctggaagtgaacattaggagagctttcaggtctatagtgagaaaggatatatcttcaaataaaaattagacagaagaatactgataaacttgtttgtgaagtgtgaactcagctaacacaggtggatctttcttttgatacagcagttttgaaaaacactttgttgaatctgcaagtggacatttgtatagatttgaagatttcgttggaaacgggaatatcttcatatcaaatctagacagaagcagtctcagaaacgtctttgtgatgtttgcattcaactcatagagttgaacattcccttccagagagtagctttgaagcactctttttgtagcatgtgcaagtggacatttggagcgccctgaggcctacggggaaaaagcaaatatcttcccataaccactagacagaaacattctcagaaactcctttatgatgtatgcactcaactaacagaaaagaaccttccttttgacagagcagttttgatacactctttttgtagaatctgcaagtggatatttgggtagctgtgaagatttcgttggaaacgggaatatcttcctataaaatctagacagaagcattctcagaaaccgctctgtgatgtctgcattcaagtcacagagttgaacattgcctttcatagagcaggtttgaaacgctctttttgtagtatatggaagtggacgtttcggacggtttgaggcccatggtgataaagggaatatcttcccctacaagctagaaagaagcattctgtgaaacttgtttgtgatgtgtgtactcaactaacagagttgaacctttctttttacagagcagttttgaaacactctttctgtagaatctgcgaggggatatttggatacatttcaggatttcgttggaaacgggaatatcttcatataaaatctcgacagaagcattctcagaaacttcattgtgatatctgcattcaagtcacagagcggaatattccctttcacagagtaggtttcaaacactctttttgtagtatctggaagtggacatttggagcgcattgacacctacggtgaaaagggaaatatcttcccgtaaaaactagacagaagcaatctcagaatcttctttgggatatatgcacgcagctaacagagttgaacctttctattgactgagcagatttgaaacagtctttctgtggaatctgcaagtggatatttggatagattggaggatttcgttggaaacgggattacgtatcaaaagtagacagcagcatcctcagaaacttctttgtgatgtgtgcattcaagtcacagagttgaacattccctttcctacagcagttttgaaacactctttctgtagtatctggaagtgaacattaggacagctttcagctctatggtgagaaaggaaatatcttcaaataaaaactagacagaagcattctcagaaacttgtttgtgatgtgtgaactcagctaacagaggtggatctttcttttgatagagcagttctgaaaaacactttttgttgaatctgcaagtgggcatttggatagatttgaagatttcgttggaaacgggaatatcttcatatcaaatctagacagaagcattctcagaaacgtctttgtgatgtttgcattcaacttatagagttgaacattccgtttcagagagcaggtttgaagcactctttttgtagtatgtgcaagtggatatttggagcgatctgaggcctacggtgaaaaagcaaatatcttcccataaccactagacagaaacattctcagaaacttctttatgatgtatgtactcaagtagcagagaagaactttccttttgacagagcactttggatacacactttttgtagtatctgcaagtggatatgtggatagctgtgaagatttcgttggaaacgggaatatcttcctataaagtctggacagaagcattctcagaaactgctctgtgatgtctggattcaagtcacagagttgaacattgcctttcatagagcaggtttcaaacactctttttttagtatatggaagtggacgattcggacggtttgaggaccatggtgataaaggaaatatcttcccctacaagctagaaagaagcattctgtgaaacttgtttgtgatgtgtgtactcaagtaacagagttgaacctttctttttacagagcagttttgaaacactctttttgtagaatctgcgaggggatatttggatacatttcaggatttcgttggaaacgggaatatcttcatataaaatctcgacagaagcattctcagaaacttctttgtgatatgtgcattcaagtcacagagttgaatattccctttcacagagtaggtttgaaacactctttttgtagtatctggaagtggacatttggagcgccttgacacctacggtgaaaagggaaataacttctcataaaaagtagacagaagcaatctcagaatcttctttgggatatatgcacgcagctaacagagttgagcctttctattgacagagcagttttgaaacagtctttctgtggaatctgcaagtggatatttagatagcttggaggatttcattggaaacgggattacgtataaaaagtagacagcagcatcctcagaaacttctttgtgatgtgtgcattcaagtcacagagttgaacattccctttcatacagcagttttgaaacactgtttctgtagtatctggaagtgaacattaggacagctttcaggtctatggtgagaaaggaaatatcttcaaataaaaactagacagaagcattctcataaacttgttcgtgatgcgtgaactcagctaacacacgtggatctttcttttgatagagcagttctgaaaaacactttttgttgaatatgcaagaggacatttggatagatttgaagatttcgttggaaacgggaatatcttcatatcaaatctagacagaagcattctcagaaacgtctttgtgatgttagcattcaactcatagagttgaacattccctttcagagagcagctttgaagcactctttttgtagtatgtgcaagtggatatatggagccctctgaggcctatggtgaaaaagcaaatatcttcccataaccactagacagaaacattctcagaaactcctttatgacgtatgcactcacctaacagagaagaaccttccttttgacagagcagttttgatacactctttttgtagaatctgcaagtggatatttggatagctgtgaagatttcgttggaaacgggaaattcttcctataaaatctagacagaagcattctcagaaactgctctgtgatgtctgcattcaagtcacagagttgaacattgcctttcctagagcaggtttgaaacgctctttttgtactatatggaagtggacgtttcggacggtttgaggcccatggtgataaagggaatatcttcccctacaagctagaaagaagcattctgtgaaacttgtttgtgatgtgtgtactgaagtaacagagttgaacctttctttttacagagcagttttgaaacactctttttgtagaatctgcgaggggatatttggatagatttcaggatttcgttggaaacgggaatatcttcatataaaatctcgacagaagcattctcagaaacttctttgtgatatgtgcattcaagtcacagagttgaatattccctttcacagagtaggtttgaaacactctttttgtagtatctggaagtggacatttgtagcgccttgacgcctacggtgaaaagggaaatatctccccataaaaactagacagaagcaatctcagaatcttctttgggatatatgcacgcagctaacagagttgaacctttctattgacagagcagttttgaaacagtctttctgtggaatctggaagtggatatttggatagcttggaggatttcgttggaaacgggattatgtataaaaagtagacagcagcatcctcagaaacttctttgtgatgtgtgcattcaagtcacagagttgaacattccctttcgtacagcagttttgaaacactctttctgtagtatctggaagtgaacattaggacagctttcgggtctatggtgagaaaggcaatatcttcaaataaaaactagacagaagcattctcataaacttgtttgtgatgtgtgaactcagctaacagaggtggatctttcttttgatagagcagttctgaaaaacactttttgttgaatctgcaagtggacatttggatagatttgaagatttcgttggaaacgggaatatcttcatataaaatctagacagaagcattctcagaaacgtctttgtcctgtttgcattcaactcatagagttgaacattccctttcagagagcagctttgaaacactctttttgtagtatgtgcaagtggatatttggagcgctctgaggcctacggtgaaaaagaaaatatcttcccataaccactagacagaaacattctcagaaactcctttatgacgtatgtactcaactaacagagaagaaccttcctttagacagagcagttttgatacactctttttgtagaatctgcaagtggatatttggatagctgtgaagatttcgttggatacgggaatatcttcctataaaatctagacagaagcattctcagaaactgctctgtgatgtctgcattcaagtcacagagttgaacattgcctttcatagagcaggtttgaaacgctctttttgtagtatatggaagtggacttttcggaaggtttgaggcccatggtgataaagggaatatcttcccctacaagctagaaagaagcattctgtgaaacttgtttgtgatgtgtgtactcaactaacagagttgaacctttctttttacagagcagttttgaaacactctttttgtagaatctgcgaggggatattttgatagatttcagggtttcgttggaaacgggaatatcttcatataaaatctcgacagaagcattctcagaaacttctttgtgatatctgcattccaggcacagagttgaatattccctttcacagagtaggtttgaaacactctttttgcagtatctggaagtggacatttggagcgccttgacgcctacggtgaaaagggaaatatcttcccatcaaaactagacagaagcaatctcagaatcttctttgggatatatgcgcgcagctagcagagttgatcctttctattggcagagtagttttgaaacagtctttctgtggaatctgcaagtggatatttggatagcttggaggatttcgttggaaacgggattacgtataaaaattagacagcagcatcctcagaaacttctttgtgatgtgtgcattcaagtcacagagttgaacattccctttcgtacagcagttttgaaacactctttctgtagtatctggaagtgaacattaggacagctttcaggtctatggtgagaaaggtaatatcttcaaataaaaactagacagaagcattctcataaacttgtttgtgatgtgtgaactcagctaacagatgtggatctttcttttgatagagcagttcggaaaaacactttttgttgaatctgcaagtggacatttggatagatttgaagatttcgttggaaacgggaatatcttcatatcaaatctagacagaagcattcccagatacgtctttgtgatgtttgcattcaactcatagatttgaacattccgtttcagggagcagctttgaaacactctttttgtagtatgtgcaaaaggatatttggagcactctgaggcgtaaggtgaaaaagcaaatatcttcccataaccactagacagaaacattctcagaaactcctttatgacgtatgcactcacctaacagagaagaaccttccttttgacagagcagttttgatacactgtttttgtagaatctgcaagtggatatttggatagctgtgaagatttcgttggaaacgggaatatcttcctataaaatctagacagaagcattctcagaaactgctctgtgatggctgcattcaagtcacagagttgaacattgcctttcatagagcaggtttgaaatgctctttttgtagtatatggaagtggacttttcggacggtttgaggcccatggtgataaagggaatatcttcccctacaagctagaaagaagcattctgtgaaacttgtttgtgatgtgtttactcaactaacagagttgaacctttctttttacagagcagttttgaaacactctttttgtagaatctgcgaggggatatttggatagatttcaggatttcgttggaaaggggaatatcttcatataaaatctcgacagaagcattctcagaaacttctttgtgatatgtgcattcaagtcacagagttgaatattcgctttcacagagtatgtttgaaacactctttttgtagtatctggaagtggacatttggagcgccttgacgcctacggtgaaaagggaaatatcttcccataaaaactagacagaagcaatctcagaatcttctttgggatatatgtacgcagctaatagagttgaacctttctattgacagagcagttttgaaacagtctttctgtggaatctgcaagtggatatttggatagcttgggggatttcgttggaaacgggattacgtataaaaagtagacagcagcatcctcagaaacatccttgtgatgtgtgcattcaagtcacagagttgaacattccctttcgtacagcagttttgaaacactctttctgtagtatctggaagtgaactttaggacagatttcaggtctatagtgagaaaggatatatcttcaaataaaaactagacagaagcattctcataaattgtttgtgatgtgtgaactcagctaacagaggtggatctttcttttgatagagcagttctgaaaaacactttttgttgaatctgcaagtggacatttggatagatttgaagatttcgttggaaacgggaatatcttcatatcaaatctagacagaagcattctcagaaacgtctttgtgatgtttgcattcaactcatagagttgaacattccgtttcagagaccagatttgaagcactctttttgtagtatgtgcaagtggatatttggagcgctctgaggcctacggtgaaaaagcaaatatcttcccataaccactagacagaaacattctcagaaactcctttatgacgtatgcattcacctaacagagaagaaccttccttttgacagagcagttttgatacactctttttgtagaatctgcaagtggatatttggatagctgtgaagatttcgttggaaacgggaatatcttcctataaaatctagagagaagcattctcagaaactgctctgtgatgtctgcattcaagtcacagagttgaacattgcctttcatagagcaggtttgaaacgctctttttgtagtatatggaagtggatgtttcggacggttggaggcccatggtaataaagggaatatcttcccctacaagctagaaagaagcattctgtgaaacttgtttgtgatgtgtgtactcaactaacagagttgaacctctctttttacagagcagttttgaaacactctttttgtagaatctgcgaggggatatttgatacatttcagcatttcgttggaaacgggaatatcttcatataaaatctcgacagaagcattctcagaaacttctttgtaatatgtgcattcaagtcacagagttgaatattccctttcacagagtaggtttgaaacactctttttgtagtatctggaagtggacatttggagcgccttgacacctacggtgaaaagggaaatatcttcccataaaaactagacagaagcaatctcagaatcttctttgggatatatgcatgcagctaacagagttgaacctttctattgacagagcagttttgaaacagtctttctgtggaatctgcaagtggatatttggatagcttggaggatttccgttggaaacgggattacgtataaaaagtagacagcagcatcctcagaaactactttgtgatgtgtgcattcaagtcacagagttgaacattccctttcgtacagcagttttgaaacactctttctgtagtatctggaagtgaacattaggacagctttcaggtctatggtgagaaaggcaatatcttcaaataaaaactagacagaagcattctcataaacttgtttgcgaagtgtgaactcaggtaacagaggtggatctttcttttgatacagcagttttgagaaacactttgttgaatctgcaagtggacatttggatagatttgaagatttcgttggaaacgggaatatcttcatatcaaatctagacagaagcattcccagaaacgtctttgtgatgtttgcattcaactcatagatttgaacattccgtttcagagagcagctttgaagcactctttttgtagtatgtgcaaggggatatttggagcgctctgaggcctacggtgaaaaagcaaatatcttcccataaccactagacagaaacattctcagaaactcctttatgacggtatgcactcacctaacagagaagaaccttccttttgacagagcagttttgatacactctttttgtagaatctgcaagtggatattgggatagctgtgaagatatcgttggaaacgggaatatcttcctataaaatctagacagaagcattctcagaaactgctctgtgatgtctgtattcaagtcacagagttgaacattgcctttcatagagcaggtttgaaatgctctttttgtagtatatggaagtggacgtttcagacggtttgaggcccatggtgataaagggaatatcttcccctacaagctagaaagaagcattctgtgaaacttctttgtgatgtgtgtactcaactaacagagttgaacctttctttttacagagcagttttgaaacactctttttgtagaatctgcgaggggatatttggatagatttcaggatttcgttggaaaggggaatatcttcatataaaatctcgacagaagcattctcagcaaacttctttgtgatatctgcattcaagtcacaggagttgaatattccctttcacagagtaggtttgaaacactctttttgtagtatctggaagtggacatttggagcgccttgacgcctacagtgaaaagggaaatatcttcccataaaaactagacagaagcaatctcagaatcttctttgggatatatgcacgcagctaacggagttgaacctttctattgacagagcagttttgaaacagtctttctgtggaatctgcaagtggatatttggatagcttggaggattttgttggaaacgggattacgtataaaaagtagacagcagcatcctcagaaacttctttgtgatgtgtgcattcaagtcacagagttgaacattccctttcgtagagcagttttgaaacactctttctgtagtatctggaagtgaacattaggacagctttcaggtctatggtgagaaaggaaatatcttcaaataaaaactagacagaagcattctcataaacttgtttttgatgtgtgaactcagctaacagaggtggatatttcttttgatagagcagttctgaaaaacactttttgttgaatctgcaagtggacatttggatagatttgaagatttcgttggaaacgggaatatcttcctatcaaatctagacagaagcattctcagaaacgtctttgtgatgtttgaattcaactcatagagttgaacattccgtttcagagagcagctttgaggcactctttttgtagtatgtgcaagtggatatttggagcgctctgaggcctacggtgaaaaagcaaatatcttcccataaccactagacagaaacattctcagaaactcctttatgacgtatgtactcaactaacagagaagaaccttccttttgacagagcagttttgatacacactttttgtagaatctgcaagtggatatttggatagctgtgaagatttcgttggaaacgggaatatcttcctataaaacctagacagaagcattctcagaaactgctctgtgatgtctgcattcaagtcacagagttgaacattgcctttcctagagcaggtttgaaacgctctttttgtagtatatggaagtggacgtttcggacggtttgaggcccatggtgataaagggaataccttcccctacaagctagaaagaagcattctgtgaaacttgtttgtgatgtgtgtactcaactaacagagttgaaccgttctttttacagagcagttttgaaacactctttttgtagaatctgcgaggcgatatttggatagatttcaggatttcgttggaaacgggaatatcttcatataaaatctcgacagaagcattctcagaatcttctttgtgatatctgcattcaagtcacagagttgaatattccctttcacagagtaggtttgaaacactccttttgtagtatctggaagtggacatttggagcgccttgacacctacggtgaaaagggaaatatcttcccataaaaactagacagaagcaatctcagaatcttctttgggatatatgtacgcagctaatagagttgaacctttctattgacagagcagttttgaaacagtctttctgtggaatctgcaggtggatatttggatagcttggaggatttcgttggaaacgggattacgtataaaaagtagacagcagcatcctcagaaacttctttgtgatgtgtgcattcaagtcacagagttgaacattccctttcgtacagcagttttgaaacactctttctgtagtatctggaagtgaatattaggacagctttcagctctatggtgagaaaggaaatatctttaaataaaaactagacagaagcattctcataaacttgtttgtgatgtgtgaactcagctaacagaggtggatctttccttttgatagagcagttctgaaaaacactttttgttgaatctgcaagtggacatttggatagatttgaagatttcgttggaaacgggaatatcttcatatcaaatctagacagaagcattctcagaaacgtctttgtgatgtttgcattcaactcagagttgaacattccgtttcagagagcaggtttgaagcactctttttgtagtatgtgcaagtggatatttggagggctctgaggcctacggtgaaaaagcaaatatcttcccataaccactagacagaaacattctcagaaattcctttatgacgtatgcactcacctaaaagagaagaaccttccttttgacagagcagttttgatacactctttttgtagaatctgcaagtggatatttggatagctgtgaagatttcgttggaaacgggaatatcttcctgtaaaatctagacagaagcattctcagaaactgctctgtgatgtctgcattcaagtcacagagttgaacattgtctttcatagagcaggtttgaagcgttctttttgtattatatggaagtggacgtttcggacggtttgaggcccatggtgataaagggaatatcttcccctacaagctagaaagaagcattctgtgaaacttgtttgtgatgtgtgtactcaactaacagagttgaacctttctttttacagagcacttttgaaacactctttttgtagaatctgcgaggggatatttggatagatttcaggatttcgttggaaacgtgaatatattcatataaaatcccgacagaagcattctcagaaacttctttgtgatatgtgcattcaagtcacagagttgaatattccctttcacagagtaggtttgaaacactctttttgtagtatctggaagtggacatttggagcgccttgacacctaccgtgaaaagggaaatatcttctcataaaaagtagacagaagcaatctcagaatcctctttgagatatatggacgcagctaacagagttgaacctttctattgacagagcagttttgaaacagtctttctgtggtatctgcaagtggatatttggatagcttggaggatttctttggaaacgggattacgtataaaaagtagacagcagcatcctcagaaacttctttgtgatgtgtgcattcaagtcacagagttgaacattccctttcgtacagcagttttgaaacactctttctgtagtatctggaagtgaacattaggacagctttcagctctatggtgagaaaggaaatatctacaaataaaaactagacagaagcattctcataaacttttttgtgatgtgtgaactcagctaacagaggtggatctttcttttgatagagcagttctgaaaaacacgttttgttgaatctgcaagtggacatttggatagatttgaagatgtcattggaaacgggaatatcttcatatcaaatctagacagaagcattctcagaaacgtctttgtcatgtttgcattcaactcatagagttgaacattccgtttcagagagcagctttgaagcactctttttgtagtatgtgcaagcggatatttgcagcgctctgaggcctacggtgaaaaagcaaatatcttcccataaccactagacagaaacattctcagaaactcctttatgacgtatgtactcaactaacagagaagaaccttccttttgacagagcagttttgatacactctttttgtagaatctgccagtggatatttggatagctgtgaagatttcgttggaaacgggaatatcttcctataaaatctagacagaagcattctcagaaactgctatgtgatgtctgcattcaagtcacagagttgaacattgcctttcctagagcaggtttgaaacgctctttttgtagtatatggaagtggacgtttcggacggtttgaggcccatggtgataaagggaatatcttcccctacaagctagaaagaaacattctgtgaaacttgtttgtgatgtgtgtactcaactaacagagttgaacctttctttttacagagcagttttgaaacactctttttgtagaatctgcgaggggatatttggatagatttcaggatttcgttggaaacgggaatatcttcatataaaatctcgacagaagcattctcagaaacttctttgtgatatgtgcattcaagtcacagagttgaatattccctttcacagagtaggtttgaaacactctttttgtagtatttggaagtggacatttggagcgccttgacgcctacggtgaaaagggaaatatcttcccataaaaactagacagaagcaatctcagaatcttctttgggatatatgcacgcagctaacagagttgaaccttcctattgacagagcagttttgacacagtctttctgtggaatctgcaagtggatatttggatagcttggaggatttcgttggaaacgggattacgtataaaaagtagacagcagcatcctcagaaacttctttgtgatgtgtgcattcaagtcacagagttgaacattccctttcgtacagcagttttgaagcactctttctgtagtatctggaagtgaacattaggacagctttcaggtctatggtgagaaaggaaatatcttcaaataaaaactagacagaagcattctcataaacttgtttgtgatgtgtgaactcagctaacagaggtggatctttcttttgatacagcagttttgaaaaacacttttcgttgaatctgcaagtggacatttggatagatttgaagatttcattggaaacgggaatatcttcatatcaaatctagacagaagcattctcagaaacgtctttgtgatgtttgcattcaactcatagagttgaacattccgtttcagagagcagctttgaagcactctttttgtagtatgtgcaagtggatatttggagcgctctgaggcctacggggaaaaagcaaatatcttcccataaccactacacagaaacattctcagaaactcctttatgacgtatgcactcatctaacagagaagaaccttccttttgacagagcagttttgatacactctttttgtagaatctgcaagtggatatttggatagctgtgaagatttcgttggaaacgggaatatcctcctataatatctagacagaagcattctcagaaactactctgtgatgtctgcattcaagtcacagagttgaacattgcctttcctagagcaggtttgaaacgctctttttgtagtatatggaagtggacgtttcggacgctttgaggcccatggtgataaagggaatatctttccctacaagctagaaagaagcattctgtgaaacttgtttgtggtgtgtgtactcatcttacagagttgaacctttctttttacagagcagttttgaaacactctttttgtagaatctgcgaggggttatttggatagatttcaggatttcgttggaaacgggaatatcttcctataaaatctcgacagaagcattttcagaaacttctttgtgatatctgcattcaagtcacagagttcaatattcccttccatagagaaggtttgaaacactctttttgtagtatctggaagtggacatttggagcgccttgacacctacggtgaaaagggaaatatcttcccataaaaactagacagaagcaatctcagaatcttctttgggatatatgcatgcagctaacagagttgaacctttctattgacagagcagttttgaaacagtctttctgtggaatctgcaagtggatatttggatagcttggaggatttcgttggaaatgggattacgtataaaaagtagacagcagtatcctcagaaacttctttgtgatgtgtgcattcaagtcacagagttgaacattccctttcgtacagcagttttgaaacactctttctgtagtatctggaagtgaacattaggacagctttcaggtctatggtgagaaaggaaatatcttcaaataaaaactagacagaagcattctcataaacttgtttgtgatgtgtgaactcagctaacagaggtggatctttcttttgatagagcagttctgaaaaacactttttgttgaatctgcaagtggacatttggatagatttgaagatttcgttggaaacgggaatatcttcatatcaaacctagacagaagcattctcagaaacgtctttgtgatgtttgcattcaactcatagagttgaacattcccttccagagagtagctttgaagcactctttttgtagcatgtgcaagtggacatttggagtgccctgaggcctacggggaaaaagcaaatatcttcccataaccactagacagaaacattctcagaaactcctttatgacgtatgcactcacctaacagaaaagaaccttccttttgacagagcagttttgatacactctttttatagaatctgcaagtggatatttggatagctgtgaagatttcgttggaaacgggaatatcttcctataaaatctagacagaagcattctcagaaactgctctgtgatgtctgcattcaagtcacagagttgaacgttgtctttcatagagcaggtttgaaacgctctttttgtagtatatggaagtggacttatcggacggtttgaggcccatggtgataaagggaatatcttcccctacaagctagaaagaagcattctgtgaaacttgtttgtgatgtgtgtactcaactaacagagttgaacctttctttttaaagagcagttttgaaacactctttttgtagaatctgcgaggggatatttggatagatttcaggatttcgttggaaacgggaatatcttcatataaaatctcgacagaagcattctcagaaacttctttgtgatatctacattcaagtcacagagttgaatattccctttcacagagtaggtttgaaacactctttttgtagtatctggaattggacatttggagcaccttgacacctacggtgaaaagggaaatatcttcccataaaaactagacagaagcaatctcagaatcttctttgggatatatgcacacagctaacagagttgaacttttctattgacatagcagttttgaaacagtctttctgtggaacctgcaagtggatatttggatagcttggaggatttcgttggaaacgggattacgtataaaaagtagacagcagcatcctcagaaacttctttgtgatgtgtgcattcaagtcacagagttgaacattccctttcatacagcagttttgaaacactctttctgtagtatctgaaagtgaatattaggacagctttcaggtctatattgagaaaggaaatatcttcaaataaaaactagacagaagcattctcataaacttgtttgtgatgtgtgaactcagctaacagaggcggatctttcttttgatagagcagttcggaaaaacacattttgttgaatctgcaagtggacatttggatagatttgaagatttcgttggaaacgggaatatcttcatatcaaatctagacagaagcattctcagaaacgtctttgtgatgtttgcattcaactcatagagttgaacattccgtttcagagagcagctttgaagcactctttttgtagtatgtgcaagtggatatttggagcgttctgaggcctacggggaagaagcaaatatcttcccataaccactagacaaaagcattctcagaaaatcctttatgacgtatgcactcacctaacagaaaagaaccttccttttgacagagcagttttgatacactctttttgtagaatctgcaagtggatatttggatagctgtgaagatttcgttggaaacgggaatatcttcctataaaatctatacagaagcattctcagaaactgctctgtgatgtctgcattcaagtcacagagttgaacattgcctttcatagagcaggtttgaaacgctctttttggagtatatggaagtggatgtttcggacggttggaggcccatggtgataaagggaatatcttcccctacaagctagaaagaaacattctcagaaacttctttatgacgtatgtactcaactagcagagaagaactttccttttgacagagcatttttgatacactctttttgtactatctgcaagtggatatttgtatagctgtgaagatttcgttggaaacgggaatatcttcctataaaatctagacagaagcattctcagaaacttctttgtgatatgtgcattcaagtcacagagttgaatattccctttcacagagtaggtttgaaacactctttttgtagtatctggaagtggacatttggagcgccttgacgtctacggtgaaaagggaaatatcttcccataaaaactagacagaagcaatctcagaatcttctttgggatacatgcacgcagctaacagagttgaacctttctattgacagagcagttttgaaacagtctttctgtggaatctgcaagtggatatttggatagcttggaggatttcgttggaaacgggattacgtataaaaagtagacagcagcatcctcagaatcttctttgtgatgtgtgcattcaagtcacagagttgaacattccctttcgtacagcagttttgaaacactctttctgtagtatctggaagtgaacattaggacagctttcaggtctatggtgagaaaggaaatatcttcaaatataaactagacagaagcattctcataaacttgtttgtgatgtgtgaactcagctaacagaggtggatctttcttttgatagagcagttctgaaaaacattttttgttgaatctgcaagtggacatttggatagatttgaagatttcgttggaaacgggaatatcttcatatcaaatctagacagaagcattctcagaaacgtctttgtgatgtttgcattcaactcatagagttgaacattccctttcagagagcagctttgaagcactctttttgtagtatgtgcaagtggacatttggagcgctttgaggcctacggggaaaaagcaaatatctcccataaccactagacagaaacattctcagaaactcctttatgacgtatgcactcacctaacacagaagaaccttccttttgacagagcagttttgatacactctttttgtagaatctgcaagtggatatttggatagctgtgaagatttcgttggaaacgggaatatcttcctataaaatctagacagaagaattctcagaaactgctctgtgatgtctgcattcaagtcacagagttgaacattgcctttcatagagcaggtttgaaaccctctttttgtagtatatggaagtggacgtttcgggcggtttgaggcccatggtgataaagggaatatcttcccctacaagctagaaagaagcattctgtgaaacttgtttgtgatgtgtgtactcaactaacagagttgaaccttcctttttacagagcagttttgaaacactctttttgtagaatctgcgaggggatatttggatagatttcagcatttcgttggaaacgggaatatcttcatataaaatctcgacagaagcattctcagaaacttcattgtgatatctgcattcaagtcacagagttgaatattccctttcagagagtaggtttgaaacactctttttgtaatatctggaagtggacatttggagcgccttgacacctacggtgaaaagggaaatatcttcccataaaaactagacagaagcaatctcagaatcttctttgggatatatgcacacagctaacagagttgaacttttctattgacatagcagttttgaaacagtctttctgtggaatctgcaagtggatatttggatagcttggaggatttcgttggaaacaggattacgtataaaaagtagacagcagcattctcagaaacttctttgtgatgtgtgcattcaagtcaaagagttgaacattccctttcgtacagcaggtttgaaacactctttctctagtacctggaagtgaacgggacgagagctttcaggtctattgtgagaaaggaaatatcttcaaataaaaactagacagaagcattctcataaacttgttttgatgtgtgaactcaactaacagaggtggatctttctttttatacagcccttttgaaaaacactttttgttgaatctgcaagtggacacttgaatagatttgaagatttcattggaaacggaaatatcttcatatcaaatctagacagaagcattctcagaaaacgtctttgtgatgtttgcattcaactcacagagttgaacattccctttcagagcgcagctttgaagcactctttttgtagtatgtgcaaggggatatttggagcgctctgaggcctacggtgaaaaagcaaatatcttcccataaccactagacagaaacattctcagaaactcctttatgacgtatgtactcaactaacagagaagaaccctccttttgacagagcagttttgatacactctttttgtagaatctgcaagtggatatttggatagctgtgaagatttcgttggaaacgggaatatcttcctataaaatctagacagaagcattctcagaaactgctctgtgatgtctgcattcaagtcacagagttgaacattgcctttgatagagcaggtttgaaacgctctttttgtagtatatggaagtggacgtttcggacggtttgaggcccatgatgataaagggaatatcttcccctacaagctagaaagaagcattctgtgaaacttgtttgtgaggtgtgtactcaactaacagagttgaacctttctttttacagagcagttttgaaacactctttttgtagaatctgcgaggggatatttggatagatttcaggatgtcgttggaaacgggaatatcttcatataaaatctcgacagaagcattctcagaaacttctttgtgatatctgccttcaagtcacaggagttgaatattccctttcacagagtaggtttgaaacactctttttgtagtatctggaagtggacatttggagcgccttgacgcctacggtgaaaagggaaatatcttcccataaaaactagacagaaggaatctcagaatcttctttgggatatatgcacgcagctaacagagttgaacctttctattgacagagcagtttagaaacagtctttctgtggaatctgcaagtggatatttggatagcttggaggatttcgttggaaacgggattacgtataaaaagtagacagcagcatcctcagaaacttctttgtgatgtgtgcattaaagtcacagagttgaacattccctttcgtacagcagttttgaaacactctttctgtagtatctggaagtgaacattaggacagatttcagctctatggtgagaaaggaaatatcttcaaataaaaactacacagaagcattctcataaagttgtttgtgatgtgtgaactcagctaacagatgtggatctttcttttgatagagcagttctgaaaaacactttttgttgaatctgcaagtggacatttggatagatttgaagatttcgttggaaacgggaatatcttcatatcaaatctagacagaagcattctcagaaacgtctttgtgatgtttgcattcaactcatagagttgaacattccctttcagagagcagctttgaagcactctttttgtagtatgtgcaaggggatatttggagcactctgaggcctaaggtgaaaaagcaaatatcttcccataaccactagacagaaacattctcagaaactcctttatgacgtatgcactcacctaacagagaagaaccttccttttgacagagcagttttgatacactctttttgtagaatctgcaagtggatatttggatagctgtgaagatttcgttggaaacgggaatatcttcctatacaatctagacagaagcattctcagaaactgctctgtgatgtctgcattcaagtcacagagttgaacattgcctttcctagaacaggtttgaaacgctctttttgtagtatatggaagtggacgtttcggacggtttgaggcccatggtgataaagggaatatcttcccctacaagctagaaagaagcattctgtgaaacttgtttgtgatatgtgcactcaactaacagagttgaacctttctttttacagagcagttttgaaacactctttttgtagaatctgcgaggggatatttggatagatttcaggatttcgttggaaacgggaatatcttcatataaaatctcgacagaagcattctcagaaaacttccttgtgatatgtgcattcaagtcacagagttgaatattccctttcacagagtaggtttgaaacactctttttgtagtatctggaagtggacatttggagcgccttgacgcccacggtgaaaagggaaatatcttcccataaaaactagacagaagcaatctcagaatcttctttgggatatatgcacgcagctaacagaattgaacctttctattgacagagcagttttgaaacagtctttctgtggaatctgcaagtggatatttggatagcttggaggatttcgttggaaacgggattaagtataaaaagtagacagcagcatcctcagaaacttctttgtgatgtgtgcattcaagtcacagaagttgaacattccctttcgtacagcagttttgaaacactctttctgtagtaactggaagtgaacattaggacagctttcaggtctatggtgagaaaggaaatatcttcaaataaaaactagacagaagcattctcataaacttgtttgtgatgtgtgaactcagctaacagaggtggatctttcttttgatagagcagttctgaaaaacactttttgttgaatctgcaagtggacatttggatagatttgaagatttcgttggaaacgggaatatcttcatatcaaatctagagagaagcattctcagaaacgtctttgtgatgtttgcattcaactcatacagttgaacattccgtttcagagagcagctttgaagcactctttttgtagtatgtgcaaggggatatttggagcgctgtgaggcctaaggtgaaaaagcaaatatcttcccctaaccactagacagaaacattctcagaaactcctgtatgacgtatgcactcacctaacagagaagaaccttccttttgacagagcagttttgatacactctttttgtagaatctgcaagtggatatttggatagctgtgaagctttcgttggaaacgggaatatcttcctataaaatctagacagaagcattctcagaaactgctctgtgatgtctccattcaagtcacagagttgaacattgcctttcatagagcaggttggaaacgctctttttgtagtatatggaagtggatgtttcggacggtttgaggcccatggtgataaagggaatatcttcccctacaagctagaaagaagcattctgtgaaacttgtttgtgatgtgtgtactcaactaacagagatgaacctttctttttacagagcagttttgaaacactctttttgtagaatctgcgaggggatatttggatacatttcagcatttcgttggaaacgggaatatcttcatataaaatctcgacagaagcattctcataaacttctttgtgatatctgcattcaagtcacagagttgaatattccctttcacagagtaggtttgaaacactctttttgtagtatctggaagtggacatttggagcgccttgacgcctacggtgaaaagggaaatatcttcccataaaaactagacagaagcaatctcagaatcttctttgggatatatgcacgcagctaacagagttgaacctttctattgacagagcagttttgaaacagtctttctgtggaatctgcaagtggatatttggatagcttggaggatttcgttggaaacggcattacgtataaaaagtagacagcagcatcctcagaaacttctttgtgatgtgtgcattcaagtcacacagttgaacattccctttcgtacagcagttttgaaacactctttctgtagtatctggaagtgaacattaggacagctttcaggtctatggtgagaaaggaaatatcttcaaataaaaactagacagaagcattctcataaacttgtttgtgatgtgtgaactgagctaacagacgtggatctttcttttgatacagcagttttgaaaaacactttttgttgaatctgcaagtagacatttggatagatttgaagatttcgttggaaacgggaatatcttcatatcaaatctagacagaagcattctcggaaacgtctttgtgatgtttgcattcaactcatagagttgaacattcactttcagagagcagctttgaagcactctttttgtagtatgtgcaagtggatatttggatcgctctgaggcctaaggtgaaaaagcaaatatcttcccataaccactagacagaaacattctcagaaactcctttctgacgtatgcactcacccaacagagaagaaccttccttttgacagagcagttttgatacactctttttgtagaatctgcaagtggatatttggatagctgtgaagatttcgttggaaacgggaatatcttcctataaaatctagacagaagcattctcagaaactgctctgtgatgtctgcattcaagtcacagagttgaacattgcctttcatagagcaggtttgaaacgctctttttgtagtatatggaagtggatgtttcggacggttggaggcccatggtgataaagggaatatattcccctacaagctagaaagaagcattctgtgaaacttgtttgtgatgtgtgtactcaactaacagagttgaacctttctttttacagagcagttttgaaacactctttttgtagaatctgcgaggagatatttggaaagatttcaggattttgttggaaacgggaatatcttcatataaaatcgcgacagaagcattctcagaaacttctttgtgatatgtgcattcaatcacagagttgaatattccctttcacagagtaggtttgaaacactctttttgtagtatctggaagtggacatttggagcgccttgacacctacggtgaaaagggaaatatcttcccataaaaactagacagaagcaatctcagaatcttctttgggatatatgcacgcagctaacagagttgaacctttctattgactgagcagatttgaaacagtctttctgtggaatctgcaagtggatatttggatagattggaggatttcgttggaaacgggattacgtataaaaagtagacagcagcatcctcagaaacttctttgtgatgtgtgcattcaagtcacagagttgaacattacctttcgtacagcagttttgaaacactctttctgtagtatctggaagtgaacattaggacagctttcaggtctatggtgagaaaggaaatatcttcaaataaaaactagacagaagcattctcataaacttgttcgtgatgtgtgaactcagctaagagccgtggatctttcttttgatagagcagttttgaaaaacactttttgttgaatctgcaagtggacatttggatagatttgaagatttctttggaaacgggaatatcttcatatcaaatctagacagaagcattctcagaaacgtctttgtgatgtttgcattcaactcatagagttgaacattccctttcagagagcagctttgaagcactctttttgtagtatgtgcaaggggatatatggagccgctctgaggcctaaggtgaaaaagcaaatatcttcccataaccactagacagaaaacattctcagaaactcctttatgacgtatgtactcaactaacagagaagaaccttccttttgacagagcacttttgatacactctttttgtagaatctgcaagtgcatatttggatagctgtgaagatttcgttggaaacgggaatatcttcctataaagtctagacagaagcattctcagaaactgctctgtgatgtctgcattcaagtcaaagagttgaacattgcctttcatagagcaggtttgaaacgctctttttgtagtatatggaagtggacgtttcggacggtttgaggcccatggtgataaagggaatatcttcccctacaagctagaaagaagcattctgtgaaacttgtttgtgatgtgtgtactgaagtaacagagttgaacctttctttttacagagcagttttgaaacactctttttgtagaatctgcgaggggatatttggatagatttcaggatttcgttggaaacgggaatatcttcatagaaaattctcgacagaaagcattctcagaaacttctttgtgatatgtgcattcaagtcacagagttgaatattccctttcacagagtaggtttgaaacactctttttgtagtatctggaagtggacatttggagcgccttgacacctacggtgaaaagggaaataacttctcataaaaagtagacagaagcaatctcagaatcttctttgggatatatgcacgcagctcacagagttgaacctttctattgacagagcagtttagaaacagtccttctgtggaatctgcaagtggatatttggatagcttggaggatctctttggaaacgggattacgtataaaaagtagacagcagcatcctcagaaacttctttgtgatgtgtgcattcaagtcacagagttgaacattccctttcgtacagcagttttgaaacactctttctgtagtatctggaagtgaacaataggacagctttcaggtctatggtgagaaaggaaatatcttcaaataaaaactagacagaagcattctcataaacttgtttgtgatgtgtgaactcagctaacggacgtggatctttcttttgatacagcagttttgaaaaacactttttgttgaatctgcaagtggacatttggatagatatgaagattccgttggaaacgggaatatcttcatatcaaatctagacagaagcattcccagaaacgtctttgtgatgtttgcattcaactcatagagttgaacattccctttcagagagcagctttgaagcactctttttgtagtatgtgcaaggggatatttggagcgctctgaggcctaaggtgaaaaagcaaatatcttcccataaccactagacagaaacattctcagaaactcctttatgacgtatgcactcacctaacagaaaagaaccttccttttgacagagcagttttgatacactctttttgtagaatctgcaagtggatatttggatagctgtgaagatttcgttggaaacgggaatatcttcctataaaatatagacagaagcattctcagaaattgctctgtgatgtctgcattcaagtcacagagttgaacattgcctttcctagagcaggtttgaaacgctctttttgtagtatatggaagtggacgtttcggacggtttgaggcccatggtgataaagggaatatcttcccctacaagctagaaagaagcattctgtgaaacttgtttgtgatgtgtgtactcaactaacagagttgaacctttctttttacagagcagttttgaaacactctttttgtagaatctgagaggggatatttggatagatttcaggatttcgttggaaatgggaatatcttcatataaaatctcgacagaagcattctcagaaagcttctttgtgatatgtgcattcaagtcacagagttgaatattccctttcacagagtaggtttgaaacactctttttgtagtatctggaagtggacatttggagcgccttgacgcctacggtgaaaagggaaatatcttctcataaaaagtagacagaagcaatctcagaatcttctttgggatatatgcacgcagctaacagagttgaacctttctattgacagagcagttttgaaacagtctttctgtggaatctgcaagtggatatttgtatagattggaggatttcgttggaaacgggattacgtataaaaagtagacagcagcatcctccgaaacttctttgtgatgtgtgcattcaagtcacagagttgaacattccctttggtacagcagttttgaaacactctttctgtagtatctggaagtgaacattaggacagctttcagctctatggtgagaaaggaaatatcttcaaataaaaactagacagaagcattttcataaacttgtttgtgatgtgtgaactcagctaagagaggtggatctttcttttgatagagcagttctgaaaaacactttttgttgaatctgcaagtggacatttggatagatttgaagatttcgttggaaacgggaatatcttcatatcaaatctagacagaagcattctcagaaacgtctttgtgatgtttgcattcaactcatagagttgaacattccgtttcagagagcagctttgaagtactctttttgtagtatgtgcaagtggatatttggagcgctctgaggcctacggggaaaaagcaaatatcttcccataaccactacactgaaacattctcagaaactcctttatgacgtgtgcactcacctaacggagaagaaccttccttttgacagagcagttttgatacactctttttgtagaatctgcaagtggatatttggatagctgtgaagatttcgttggaaacgggaatatcttcctataaaatctagacagaagcattctcagaaactgctctgtgatgtctgcattcaagtcacagagttgaacattgcctttcatagagcaggtttgaaatgcttttttgtagtatatggaagagaatgtttcggacggttggaggcccatggtgataaagggaatatcttcccctacaagctagaaagaagcattctgtgaaagttgtttttgatgtgtgtactcaactaacagagttgaacctttctttttacagagcagttttgaaacactctttttgtagaatctgcgagaggatatttggatagatttcaggatttcgttggaaacgggaatatcttcatataaaatctcgacagaaagcattctcagaaacttctttgtgatatctgccttcaagtcacagtagttgaatattccctttcacagagtaggtttgaaacactctttttgtagtatctggaagtggacatttggagcgccttgacgcctacggtgaaaagggaaatatcttcccataaaaactagacagaagcaatctcagcatcttctttgggatatatgcacgcagctaacagagttgaacctttctattgacagagcagttttgaaacagtctttctgtggaatctgcaagtggatatttggatagcttggaggatttcgttggaaacgggattacgtataaaaagtagacagcagcatcctcagaaacttctttgtgatgtgtgcattcaagtcacagagttgaacattccctttcgtacagcagttttgaaacactctttctgtagtacatggaagtgaacattaggacagctttcaggtctatggtgagaaaggaaatatcttcaaataaaaactagacagaagcattctcataaacctctttgtgatgtgtgaactcagctaacagaggtggatctttcttttgatagagcagttctgaaaaacactttttgttgaatctgccagtggacatttggatagatttgaagatttcgttggaaacgggaatatcttcatatcaaatctagacagaagcattcccagaaacgtctttgtgatgtttgcattcaactcatagagttgaacattccgtttcagagagcagctttgaagcactctttttgtagtatgtgcaaaaggatatttggagcactctgaggcctaaggtgaaaaagcaaatatcttcccataaccactagacagaaacattctcagaaactcctttatgacgtatgcactcacctaacagagaagaaccttccttttgccagagcagtttggatacactctttttgtagaatctgcaagtggatatttggatagctgtgaagatttcgttggaaacgggaatatcatcctataaaatctagacagaagcattctcagaaacagctctgtgatgtctgcattcaagtcacagagttgaacattgcctttcatagagcaggtttgaaccgctctttttgtagtatatggaagtggacgtttcggacggtttgagacccatggtgataaagggaatatattcccctacaagctagaaagaagcattctgtgaaacttgttgtgatgtgtgtactcaactaacagagttgaacctttctttttacagagcagttttgaaacactctttttgtagaatctgcgaggggatatttggatagatttcaggatttcgttggaaacgggaatatcttcatataaaatactcgacagaagcattctcagaaacttccttgtgatatgtgcattcaagtcacagagttgaatattccctttcacagagtaggtttgaaacactctttttgtagtatctggaagtggacatttggagcgccttgatgcccacggtgaaaagggaaatatcttcccataaaaactagacagaagcaatctcagaatcttctttgggatatatgcacgcagctaacagagttaaacctttctattgacagagcagttttgaaacagtctttctgtggaatctgcaagtggatatttggatagcttggaggatttcgttggaaacgggattacgtataaaaagtagacagcagcatcctcaggaaacttctttgtgatgtgttcattcaagtcacagagttgaacattccctttcgtacagcagttttgaaacactctttctgtagtatctggaagtgaacattaggacagctttcaggtctatggtgagaaaggcaatatcttcaaataaaaactagacagaaacattttcataaacttgtttgtgatgtgtgaactcagctaacagaggtggatctttcttttgatagagcagttctgaaaaacactttttgttgaatctgcaagtggacatttggatagatttgaagatttcgttggaaacgggaatatcttcatatcaaatctagacagaagcattctcagaaacgtctttgtgatgtttgcattcaactcatagagttgaacattccgtttcaaagagcagctttgaggcactctttttgtagtatgtgcaagtggatatttggagcgctctgaggcctacggtgaaaaagcaaatatcttcccataaccactagacagaaaacattctcagaaactcctttatgacgtatgcactcacctaacagagaagaaccttccttttgacagagcagttttgatacactctttttgtagaatctgcaagtggatatttggatagctgtgaagatttcgttggaaacgggaatatcttcctataaaatctagacagaagcattctcagaaactgcctctgtgatgtctgcattcaagtcacagagttgaacattgcctttcatagagcaggtttgaaacgctctttttgtagtatatggaagtggacttttcggacggtttgaggcccatggtgataaagggaatatcttcccctacaagctagaaagaagcattctgtgaaacttgtttgtgatgtgtgtactcaactaacagagttgaacctttcttttcacagagcagttttgaaacactctttttgtataatctgcgaggggaaatttggatagatttcaggatttcgttggaaacgggaatatcttcatacaaaatctcgacagaagcattctcagaaacttccttgtgatatgtgcattcaagtcacagagttgaatattccctttcacagagtaggtttgaaacactctttttgtagtatctggaagtagacatttggagcgccttgacacctacggtgaaaagggaaatatcttcccataaaaactagacagaagcaatctcagaatcttctttgggatatatgcacgcagctaacagagttgaacctttctattgacagagcagttttgaaacagtctttctgtggaatctgcaagtggatattgggatagcttggaggatttcgttggaaacgggattacgcataaaaagtagacagcagcatcctcagaaacttctttgtgatgtgtgcattcaagtcacagagttgaacattccctttcgtacagcagttttgaaacactctttctgtagtatctggaagtgaacattaggacagctttcaggtctatggtgagaaagaaaatatcttcaaataaaaactagacagaagcattctcataaacttgtttgtgatgtgtgaactcagctaacagaggtggatctttcttttgatagagcagttctgaaaaacactttttgttgaatctgcaagtggacatttggataaatttgaagatttcgttggaaacgggaatatcttcatatcaaatctagacagaagcattctcagaaacgtctttgcgatgtttgcattcaactcatagagttgaacattccctttcagagagcagctttgaggcactctttttgtagtatgtgcaagtggatatttggagcgctctgtggcctacggtgaaaaagcaaatgtcttcccataaccactagacagaaacattctcagaaactcctttatgacgtatgcactcacctaacagagaagaaccttccttttgacagagcagttttgatacactctttttgtagaatctgcaagtggatattttgatacctgtgaagatttcgttggaaacgggaatatcttcgtataaaatctagacagaagcattctcagaaactgctctgtgatgtctgcattcaagtcacagagttgaacattgcctttcatagagcaggtttgaaacgctctttttgtagtatatggaagtggacttttcggacggtttgaggcccatggtgataaagggaatatcttcccctacaagctagaaagaaagcattctgtgaaacttgtttgtgatgtgtgtactcaactaacagagttgaacctttctttttacagagcagttttgaaacactctttttgtagaatctgcgaggggatatttggatacatttcagcatttcgttggaaacgggaatatcttcatataaaatctcgacaggaagcattctcagaaacttccttgtgatatgtgcattcaagtcacagagttgaatattccctttcacagagtaggtttgaaacactctttttgtagtatctggaagtggacatttggagcgccttgacgcctacggtgaaaagggaaatatcttcccataaaaacaagacagaagcaatctcagaattttctttgagatatatgcacacagctaacagagttgaacctttctattgacagagcagttttgaaacagtctttctgtggaatctgcaagtggatatttggatagcatggaggatttcgttggaaacgggattacgtataaaaagtagacagcagcatcctcagaaacttctttgtgatgtgtgcattcaagtcacagagttgaacattccctttcatacagcagttttgaaacactctttctgtagtatctggaagtgaacattaggagagctttcaggtctatggtgagaaaggaaatatcttcaaataaaaactagacagaagcattctcataaacttgtttgtgatgtgtgaactcagctaacagaggtggatctttcttttgatagagcagttctgaaaaactcttttgttgaatctgcaagtggacatttggatagatttgaagatttcgttggaaacgggaatatcttcatatcaaatctagacagaagcattctcagaaacgtctttgtgatggttgcattcaactcatagagttgaacattccgtttcagagagcagctttgaatcactctttttgtagtatgttcaagtggatatttggagcgctctgaggcctacggtgaaaaagcaaatatcttcccataaccactagacagaaacattctcagaaactcctttatgacgtatgtactcaactaacagagaagaacattctttttcacagagcagttttgatacactctttttgtagaatctgcaagtgcatatttggatagctgtgaagatttcgttggaaacgggaatatcttcctataaaatctagacagaagcattctcagaaactgctctgtgatgtgtgcattcaagtcacagagttgaacattgcctttcatagagcaggtttgaaatgctctttttgtagtatatggaagtggacgtttcagacggtttgaggcccatggtgataaagggaatatcttcccctacaagctagaaagaagcattctgtgaaacttgtttttgatgtgtgtactcaactaacagagttgaacctttctttttacagagcagttttgaaacactctttttgtagaatctgcgaggggatatttggagagatttcaggatttcgttggaaacgggaatatcttcatataaaatctcgacagaagcattctcagaaacttctttgtgatatctgcattcaagtcacagagttgaatattccctttcacagagtaggtttgaaacactctttttgcagtatctggaagtggacatttggagcgccttgacgcctacggtgaaaagggaaatatcttcccataaaaactagatagaagtaatctcagaatcttctttgggatatatgcacgcagctaacagagttgaacctttctattgacagagcagttttgaaacagtctttctgtggaatctgcaattggatatttggatagcttggaggatttcgttggaaacgggattacgtataaaaagtagacagcagcatcctcagaaacttctttgtgatgtgtgcattcaagtcacagagttgaacattccctttcgtacagcagttttgaaacactctttctgtagtatctggaagtgaacattaggacagctttcaggtctatggtgagaaaggaaataccttcaaataaaaactagacagaagcattctcataaatttgtttgtgatgtgtgaactcagctaacagaggtggatctttcgatagagcagttctgaaaaacactttttgttgaatctgcaagtggacatttggatagatttgaagatttcgttggaaacgggaatatcttcatatcaaatctagacagaagcattctcagaaacgtctttgtgatgtttgcattcaactcatagagttgaacattcccttccagtgagtagctttgaagcactctttttgtagcatgtgcaagtggacatttggagcgccctgaggcctacggggaaaaagcaaatatcttcccataaccactagacagaaacattctcagaaactcctttatgacgtatgcactcacctaacagagaagaaccttccttttgacagagcagttttgatacactctttttgtagaatctgcaggtggatatttggatacctgtgaagatttcgttggaaacgggaatatcttcctataaaatctagacagaagcattctcagaaactgctctgtgatgtctgcattcaagtcacagagctgaacattgcctttcatagagcaggtttgaaacgctctttttgtagtatatggaagtagacgtttcggacagtttgaggcccatggtgataaaggaatatcttcccctacaagctagaaagaagcattctgtgaaacttgtttgtgaggtgtgtactcaactaacagagttgaacctttctttttacagagcagttttgaaacactctttttgtagaatctgcgaggggatatttggatagatttcaggatttcgttggaaacgggaatatcttcatataaaatctcgacagaagcattctcagaaacttctttgtgatatgtgcattcaagtcacagagttgaatattccctttcacagaataggtttgaaacactctttttgtagtatctggaagtggacatttggagcgccttgacgcctacggtgaaaagggaaatatcttcccataaaaactagacagaagcaatctcagaatcttctttgggatatatggacgcagctaacagagttgaacctttctattgacagagcagttttgaaacagtctttctgtggaatctgcaagtggatatttggataacttggaggatttcgttggaaacgggattacgtataaaaagtagacagcagcatcctcagaaacttctttgtgatgtgtgcattcaagtcacagagttgaacattccctttcgtacagcagttttgaaacactctttctgtagtatctggaagtgaacattaggacacctttcaggtctatggtgagaaaggaaatatcttcaaataaaaactagacagaagcattctcataaacttgtttgtgatgtgtgaactcagctaacagaggcggatctttcttttgttacagcagttttgaaaaacactttttgttgaatctgcaagtggacatttggatagatttgaagatttcgttggaaacgggaatatcttcatatcaaatctagacagaagcattctcagaaacgtctttgcgatgtttgcattcaactcatagagttgaacattccctttgagagagcagcttttaagcactctttttgtagcatgtgcaagagaaaatttggagcgccctgaggcctacggtgaaaaagcaaatatcttcccataaccactagacagaaacattctcagaaactcctgtatgacgtatgtactcaactaacagagaagaaccttccttttgacagagcagttttgatacactctttttgtagaatctgcaagtggatatttggatagctgtgaagatttcgttggaaacgggaatatcttcctataaaatctcgacagaggcattctcagaaactgctctgtgatgtctgtattcaagtcacagagttgaacattgcctttcatagagcaggtttgaaacgctctttttgtagtatatggaagtggatgtttcggacggttggaggcccatggtgataaagggaatatcttcccctacaagctagaaagaagcattctgtgaaacttgtttgtgatgtgtgtactcaagtaacagagtagaacctttctttttacagagcagttttgaaactctctttctgtagaatctgcgaggggatatttggatagatttcaggatttcgttggaaacgggaatatcttcatataaaatctcgacagaagcattctcagaaacttctttgtgatatgtgcattcaagtcacagagttgaatattccctttcacagagtaggtttgaaacactcttgttgtagtatctggaagtggacatttggagcgccttgacgcctacggtgaaaagggaaatatcttcccataaaaactagacagaagcaatctcagaatcttctttgggatatattcacgcagctaaaagagttgaacctttctattgacagagcagttttgaaacagtctttctgtggaatctgcaagtggatatttggatagcttggaggatttcgttggaaacgggattacgtataaaaagtagacagcagcatcctcagaaacttctttgtgatgtgtgcattcaagtcacagagttgaacattccctttcgtacagcagttttgaaacactctttctgtagtatctggacgtgaacattaggacagctttcaggtctatggtgagaaaggaaatatcttcaaataaaaactagacagaagcattctcataaacttgtttgtgatgtgtcaactcagctaagagaggtggatctttcttttgatagagcagttctgaaaaacactttttgttgaatctgcaagtggacatttcgatagatttgaagatttcgttggaaacgggaatatcttcatatcaaatctagacagaagcattctcagaaacgtctttgtgatgtttgcattcaactcatacagttgaacattccctttcagagagcagctttgaagcactctttttgtagtatgtgcaagtggacaattggagcgctttgaggcctacggggaaaaagcaaatatcttctcataaccactagacaggaacattctcagaaactcctttatgacgtatgcactcacctaacagaaaagaaccttccttttgacagagcagttttgatacactctttttgtggaatctgcaagtggatatttggatagctgtgaagatttcgttggaaacgggaatatattcctataaaatctagacagaagcattctcagaaactgctctgtgatgtctgcattcaagtcacagagctgaacattgcctttcatagagcaggtttgaaacgctctttttgtagtatatggaagtggacgtttcggacagtttgaggcccatggtgataaagggaatatcttcccctacaagctagaaagaagcattctcaggaacttctttgtgatgtgtgtactcaactaatggagttgaacctttcttttacagaacagttttgaaaaactctttttgtagaacctgcaagtggatatttggatagatttaaagatttcgtcggaaacggggatgtcttaatataaaatctagaccgaagcattctcagaaacttctttgtgatatctgcattcaagtcacagagttgaatattccctttcacagagtaggtttgaaacactctttttgtagtatctggaagtggacatttggagcgccttgacgcctacggtgaaaagggaaatatcttcccataaaaacttgacagaagcaatctcagaatcttctttgggatatatgcacgcagctaacagagttgaacctttctattgacagagcagttttgaaacagtctttctgtggaatctgcaagtggatatttggatagcttggaggatttctttggaaacgggactacgtgtaaaaagtagacagcagcatcctcagaaacatccttgtgatgtgtgcattcaagtcacagagttgaacattccctttcgtacagcagttttgaaacactctttctgtagtatctggaagtgaacattaggacagctttcaggtctatagtgagaaaggatatatcttcaaataaaaactagacagaagcattctgataaacttgtttgtgaagtgtgaactcagctaacagaggtggatctttcctttgatagagcagttctgaaaaacactttttgttgaatctgcaagtggacatttggatagatttgaagatttcgttggaaacgggaatatcttcatatcaaatctagacagaagcattctcagaaacgtctttgcgatgtttgcattcaactcatagagttgaacattccgtttcagagtgcagctttgaggcactctttttgtagtatgtgcaagtggatatttggagcgctctgaggccttcggtgaaaaagcaaatatcttcccataaccactagatggaaacattctcagaaactcctttatgacgtatgcactcacctaacagagaagaaccttccttttgacagagcagttttgatacactctttttgtagaatctgcgaggggatatttggatagatttcaggatttcgttggaaacgggaatatcttcatataaaatctcgacagaagcattgctcagaaactgctctttgatgtttgcattcaagtcacagagttgaacattgcctttcatagagcaggtttcaagcactctttttttagtatatggaagtggacgtttcggacggtttgaggcccatggtgataaaggaaatatcttcccctacaagctagaaagaagcattctgtgaaacttgtttgtgatgtgtgtactcaactaacagagttgaacctttctttttacagagcagttttgaaacactctttttgtagaatctgcgaggggatatttggatagatttcaggattccgttggaaacgggaatatcttcatataaaatctcgacagaagcattctcagaaacttcttttgtgatatctgcattcaagtcacagagttgaatattccctttcacagagtaggtttgaaacactctttttgtagtatctggaagtggacatttggagcgccttgacacctacggtgaaaagggaaatatcttcccataaaaactagacagaagcaatctcagaatcttctttgggatatatgcacgcagctaacagagttgaacctttctattgacagagcagttttgaaacagtctttctgtggaatctgtcaagtggatatttggatagcttggaggatttcgttggaaacgggattacttataaaaagtagacagcagcatcctcagaaacttctttgtgatgtgtgcattcaagtcacagagttgaacattccctttcgtacagcagttttgaaacactctttctgtagtatctggaagtgaacattaggacagctttcaggtctatggtgagaaaggaaatatcttcaaataaaaactagacaaaagcattctcataaacttgtttgtgatgtgtgaactcagctaacagaggtggatctttcttttggtagaccagttctgaaaaacactttttgttgaatctgcaagtggacatttggatagatttgaagatttcgttggaaacgggaatatcttcatatcaaatctagacagaagcattctcagaaacgtctttgtgatatttgcattcaactcatagagttgaacattccctttcagagagcagctttgaagcactctttttgtagtatgtgcaagtggagatttggagcgctttgaggcctacggtgaaaaagcaaatatcttcccataaccactagacagaaacattctcagaaactcctttatgacgtgtgcactcacctaacagagaagaaccttccttttgacagagcagttttgatacactctttttgtagaatctgcaagtggatatttggatagctgtgaagatttcgttggaaacgggaatatcttcctataaaatctagacagaagcattctcagaaactgctctgtgatgtctgcattcaagtcacagagttgaacattgcctttcatagagcaggtttgaaacgctctttttgtactatatggaagaggacgtttcgaacggtttgaggaccatggtgataaagggtatatcttcccctacaagctagaaagaagcattctgtgaaacttgtttgtgatgtgtgtactcaactaacagagttgaacctttctttttacagagcagttttgaaacactctttttgtagaatctgcgaggggatatttggatagatttcaagatttcgttggaaacgggaatatcttcatataaaatctcgacagaagcattctcagaaacttctttgtgatatgtgcattcaagtcacagagttgaatattcccttttacagagtaggtttgaaacactctttttgtagtatctggaagtgaacatttggagcgccttgacgcctacggtgaaaagggaaatatcttctcataaaaagtagacagaagcaatctcagaatcttctttgggatatatgcacgcagctaacagagttgaacctttctattgacagagcagttttgaaacagtctttctgtggaatctgcaagtggatatctggatagcttggaggatttctttggaaacgggattacgtataaaaagtagacagcagcatcctcagaaacttctttgtgatgtgtgcattcaagtcacagagttgaacattccctttcgtacagcagttttgaaacactctttctgtagtatctggaagtgaacattaggacagctttcaggtctatggtgagaaaggaaacatcttcaaataaaaactagacagaagcattctcataaacttgtttgtgatgtgtgaactcagctaacagagttggatctttcttttgatagagcagttcttaaaaacacgttttgttgaatctgcaagtggacatttggatagatttgaagatttcgttggaaacgggaatatcttcatgtaaaatctagacagaagcattctcagaaacgtctttgtgatgtttgcattcaactcatagagttgaacattccgtttcagagagcagctttgaggcactctttttgtagtatgtgcaaggggatatttggagcgctgtgaggcctacggtgaaaaagcaaatatcttcccataaccactagacagaaacattctcagaaactcctttatgacgtatgcactcacctaacagaaaagaaccttccttttgacagagcagttttgatacactctttttgtagaatctgcaagtggatatttggatagctgtgaagatttcgttggaaacgggaatatcttcctataaaatctagacaggaagcattctcagaaactgctctgtgatgtctgcattcaagtcacagagttgaacattgcctttcctagagcaggtttgaaacactctttttgtagtatatgaaagtggacgtttcggacggtttgaggaccatggtgataaagggaatatcttcccctacaagctagaaagaagcattctgtgaaacttgtttgtgatgtgtgtactcaactaacagagttaaacctttctttttacagaacagttttgaaacactctttttgtagaatctgcgaggggatatttggatagatttcaggatttcgttggaaacgggaatatcttcatataaaatctcgacagaaacattctcagaaacttctttgtgatatctgcattcaagtcacagagttgaatattccctttcacagagtaggtttgaaacactccttttgtagtatctggaagtggacatttggagcaccttgacgcctacggtgaaaagggaaatatcttcccataaaaactagacagaagcaatctcagaatcttctttgggatatatgcacgcagctaacagagttgaacctttctattgacagagcagttttgaaacagtctttctgtggaatctgcaagtggatattttgatagcttggaggatttcgttggaaacgggattacgtataaaaagtagacagcagcatcctcagaaacttctttgtgatatgtgcattcaagtaacagagttgtttcgtacagcatttttgaaacactctttctgtagtatctgggagtgaacattaggacagctttcaggtctatggtgagaaaggaaatatcttcaaataaaaactagacagaagcattctcataaacttgtttgtaatgtgtgaactcagctaacacacgtggatctttcttttgatagagcagttctgaaaaacactttttgtttaatctgcaagtggacatttggatagatttgaagatttcgttggaaacgggaatatcttcatatcaaatctagacagaagcattctcagagacgtctttgtgatgtttgcattcaactcatagagttgaacattccctttcagagagcagctttgaagcactctttttgtagtatgtgcaagtggatattttgagcgctctgaggcctacggtgaaaaagcaaatatcttcccataaccactagacagaaacattctcagaaactcctttatgacgtatgtactcaactagcagagaagaactttccttttgacagagcatttttgatacactctttttgtactatctgcaagtggatatttggatagctgtgaagatttcgttggaaacgggaatatcttcctataaattctggacagaagcattctcagaaactgctctgtgatgtctgcattcaagtcacagagttgaacattgcctttcatagagcaggtttgaaacactctttttttagtatatggaagtggacgtttcggacggtttgaggcccatggtgataaagggaatatcttcccctacaagctagaaagaagcattctgtgaaacttgtttgtgatgtgtgtactcaactaacagagttgaacctttctttttacagagcagttttgaaacactctttttgtagaatctgcgaggggatatttggatagatttcaggatttcgttggaaacgggagtatcttcatataaaatctcgacagaagcattctgagaaacttctttgtgatatctgccttcaagtcacagagttgaatattccctttcacagagtaggtttgaaacactctttttgtagtatctggaagtggacatttggagcgccttgacgcctacggtgaaaagggaaatatcttcccataaaaactagacagaaggaatctcagaatcagctttgggatatatgcacgcagctaacagagttgaacctttctattgacagagcagttttgaaacagtctttctgtggaatctgcaagtggatatttggatagcttggaggatttcgttggaaacgggattacgtataaatagtagacagccagcatcctcagaaacttctttgtgatgtgtgcattcaagtcacagagttgaacattccctttcgtacagcagttttgaaacactctttctgtagtatctggaagtgaacattaggacagctttcagctctatggtgagaaaggaaatatcttcaaataaaaactagacagaagcattctcataaacttgtttgtgatgtgtgaactcaggctaacagaggtggatctttcttttgatagagcagttctgaaaaacactttttgttgaatctgcaagtggacatttggatagatttgaagatttcgttggaaacgggaatatcttcatatcaaatctagacagaagcattctcagaaacgtctttgtgatgttagcattcaactcatagagttgaacattccctttcagagagcagctttgaagcactctttttgtagtatgtgcaagtggatatttggagcgctctgaggcctatggtgaaaaagcaaatatcttcccataaccactagacagaaacattctcagaaactccttcatgacgtatgcactcacctaacagagaagaaccttccttttgacagagcacttttgatacactctttttgtagaatctgcaagtggatatttggatagctgtgaagatttcgttggaaacgggaatatcttcctataaaatctatacagaagcattctctgaaactgctctgtgatgtctgcattcaagtcacagagttgaacgttgcctttcatagagcaggtttcaaacactctttttttagtatatggaagtggacgtttcggacggtttgaggaccatggtgataaaggaaatatcttcccctacaagctagaaagaagcattctgtgaaacttgtttatgatgtgtgtactcaactaacagagttgaacctttcttttcacagagcagttttgaaacactctttttgtagaatctgcgaggggaaatttggatagatttcaggatttcgttggaatcgggaatatcttcatacaaaatctcgacagaagcattctcagaaacttctttgtgatatgtgcattcaagtcacagagttgaatattccctttcacagagtaggtttgaaacactctttttgtagtatctggaagtggacatttggagcgccttgacacctacggtgaaaatggaaatatcttcccataaaaactagacagaagcaatctcagaatcctctttgagatatatggacgcagctaacagtgttgaacctttctattgacagagcagttttgaaacagtctttctgtggtatctgcaagtggatatttggatagcttggaggatttctttggaaacgggattacgtataaaaagtagacagcagcatcctcagaaacatcccttgtgatgtgtgcattcaagtcacagagttgaacattccctttcgtacagcagttttgaaacactctttctgtagtatctggaagtgaactttaggacagctttcaggtctatagtgagaaaggatatatcttcaaataaaaactagacagaaagcattctcataaacttgtttgtgatgtctgaactcagctaacagaggtggatctttcttttgatagagcagttctgaaaaacactttttgttgaatctgcaagtggacatttggatagatttgaagatttcgttggaaacgggaatatcttcatatcaaatctagacagagcattctcggaaacgtctttgtgatgtttgcattcaactcatagagttgaacattccgtttcagagagcagctttgaggcactctttttgtagtatgtgcaagtggatatttggagcgctctgaggccttcggtgaaaaagcaaatatcttcccataaccactagacagaaacattctcagaaactcctttatgacgtatgcactcacctaacagagaagaaccttccttttgacagagcagttttgagatactctttttgtagaatctgcaagtggatattgggatagctgtgaagctttcgttggaaacgggaatatcttcctataaaatctagacagaagcattctcagaaactgctctgtgatgtctgcattcaagtcacagagttgaacattgcctttcatagagcaggtttgaaacgctctttttgtagtatatggaagtggaagtttcggacggtttgaggcccatggtgataaagggaatatcttcccctacaagctagaaagaagcattctgtgaaacttgtttgtgatgtgtgtactcaactaacagagttgaacctttctttttacagagcagttttgaaacactctttttgtagaatctgcgaggggatatttggatagatttcaggatttcattggaaacgagaatatcttcatataaaatctcgacagaagcattctcagaagcttctttgtgatatgtgcattcaagtcacagagttgaatattccctttcacagagtaggtttgaaacaatctttttgtagtatctggaagtggacatttagagcgccttgacgcctacggtgaaaagggaaatatcttctcataaaaagtagacagaagcaatctcagaatcttctttgggatatatgcacgcagctaacagatttgaacctttctattgacagagcagttttgaaacagtctttctgtggaatctgcaagtggatatttggatagcttggaggatttcgttggaaacgggattacgcataaaaagtagacagcagcatcctccgaaacttctttgtgatgtgtgcattcaagtcacagagttgaacattccctttcgtacagcagttttcaaacactctttctgtagtatctggaagtgaacattaggacagctttcagctctatggtgagaaaggaaatatcttcaaataaaaactagacagaagcattctcataaacttctttgtgatgtgtgaactcagctaacagaggtggatctttcttttgatagagcagttctgaaaaacactttttgttgaatctgcaagtggacatttggatagatttgaagatttcgttggaaacgggaatatcttcatatcaaatctagacagaagcattctcagaaaagtctttgtgatgtttgcattcaactcacagagttgaacattccctttcagagagcagctttgaagcactctttttgtagtatgtgcaaggggatatttggagcgctctgaggcctacggtgaaaaagcaaatatcttcccataaccactagacagaaaacattatcagaaactcctttatgacgtatgcactcacctaacagaaaagaaccttccttttgacagagcagttttgatacactctttttgtagaatctgcaagaggatatttggatagctgtgaagatttcgttggaaacgggaatatcttcctataaaatctagacagaagcattctcagaaactgctctgtgatgtctgcattcaagtcacagagttgaacattgtctttcatagagcaggtttgaagcgttctttttgtagtatatggaagtggacgtttcggacggtttgaggcccatggtgataaagggaatatcttcccctacaagctagaaagaagcattctgtgaaacttgtttgtgatgtgtgtactcaactaacagagttgaacctttctttttacagagcagttttgaaacactctttttgtagaatctgcgaggggatatttggatggatttcaggatttcgttggaacgggaatatcttcatataaaatctcgacagaagcattctcagaaacttctttgtgatatgtgcattcaagtcacagagttgaatattccctttcagagagtaggtttgaaacactctttttgtagtatctggaagtggacatttggagcgccttgacacctacggtgaaaagggaaatatcttcccataaaaactagacagaagcaatctcagaatcttctttgggatatatgcacgcagctaacagagttgaacctttctattgacggagcagttttgaaacagtctttctgtggaatctgcaagtggatatttggatagcttggaggatttcgttggaaacgggattacgtataaaaagtagacagcagcatcctcagaaacttctttgtgatgtgtgcattcaagtcacagagttgaacattccctttcgtacagcagttttgaaacactctttctgtagtatctggaagtgaacattaggacagctttcgggtctatggtgagaaaggaaatatcttcaaataaaaactagacagaaagcattctcataaacttgtttgtgatgtgtgaactcagctaacagcaggtggatctttcttttgatacagcagttctgaaaaacactttttgttgaatctgcaagtggacattaggatagatttgaagatttcgttggaaacgggaatatcttcatatcaaatctagacagaagcattcccagaaacgtctttgtgatgtttgcattcaactcatagagttgaacattccgtttcagagagcagctttgaagcactctttttgtagtatgtgcaaggggatatttggagcactctgaggcctaaggtgaaaaagcaaatatcttcccataaccactagacagaaacattctcagaaactcctttatgacgtatgcactcagctaacagagaagaaccttccttttgacagagcagttttgatacactctttttgtagaatctgcaagtggatatttggatagctgtgaagatttctttggaaacgggaatatcttcctataaaatctatacagaagcattctcagaaactgctctgtgatgtctgcattcaagtcacagagttgaacattgcctttcatagagcaggtttgaaacgctctttttgtagtatatggaagtggacgtttcgtacggtttgaggcccatgatgataaagggaatatcttcccctacaagctagaaagaagcattctgtgaaacttgtttgtgatgtgtgtactcaactaacagagttgaacctttcttttcacagagcagttttgaaacactctttttgtagaatctgcgagcggaaatttggatagatttcaggatttcgttggaaacgggaatatcttcatacaaaatctcgacagaagcattctcagaaacttctttgtgatatgtgcattcaagtcacagagttgaatattccctttcacagagtaggtttgaaacactctttttgtagtatctggaagtggacatttggagcgccttgacgcctacggtgaaaagggaaatatcttccataaaaactagacagaagcaatctcagaatcttctttgggatatatgcatgcagctaacagagttgaacctttctattgacagagcagttttgaaacagtctttctgtggaatctgcaagtggatatttggatagcttagaggatttcgttggaaacgggattacgtataaaaagtagacagcagcatcctcagaaacttctttgtgatgtgtgcattcaagtcacagagttgaacattccctttcgtacagcagttttgaaacactctttctgtagtatctgaaagtgaatattaggacagctttcaggtctatattgagaaaggaaatatcttcaaataaaaactagacagaagcattctcataaacttgtttgtgatgtgtgaactcagctaaccgaggtggatctttcttttgatagagcagttctgaaaaacactttttgttgaatctgcaagtggacatttggatagatttgaagatgtcgttggaaacgggaatatcttcatatcaaatctagacggaagcattctcagaaacgtctttgtgatgtttgcattcaactcatagagttgaacattcccttccagagagtagctttgaagcactcattttgtagcatgtgcaagtggacatttggagcgccctgaggcctacggggaaaaagcaaatatcttcccataaccactagacagaaacattctcagaaactcctttatgacgtatgcactcacctaacagagaagaaccttccttttgacagagcagttttgatacactctttttgtagaatctgcaagtggatatttggataggtgtgaagatttcgttggaaacgggaatatcttcctataaaatctagacagaagcattctctgaaactgctctgggatgtctgcattcaagtcacggagttgaacattgcctttcctagagcaggtttgaaacgctctttttgtagtatatggaagtggacgtttcggactgtttgaggcccatggtgataaagggaatatcttcccctacaagctagaaagaagcattctgtgaaacttgtttgtgatgtgtgtactcaactaacagagttgaacctttccttttacagagtagttttgaaacactctttttgtagaatctgcgaggggatatttggatagatttcaggatttcgttggaaacgggagtatcttcatataaaatctcgacagaagcattctcagaaacttctttgtgatatctgcattcaagtcacagagttgaatattccctttcacagagtaggtttgaaacactctttttgtagtatctggaagtggacattttgagcgccttgacgcctacggtgaaaagggaaatatcttctcataaaaagtagacagaagcaatctcagaatcttctttgggatatatgcacgcagctaacagagttgaacctttctattgacagagccgttttgaaacagtctttctgtggaatctgcaagtggatatttggatagcttggaggatttcgttggaaacgggattacgtataaaaagtagacagcagcatcctcagaaactactttgtgatgtgtgcattcaagtcacagagttgaacattccctttcgtacagcagttttgaaacactctttctgtagtatctggaagtgaacattaggacagatttcagctctatggtgagaaaggaaatatcttcaaataaaaactagacagaagcattctcataaacttgtttgtgatgtgtgaactcagctaacagagatggatctttcttttgatagagcggttctgaaaaacactttttgttgaatctgcaagtggacatttggatagatttgaagatttcgttggaaacgggaatatcttcatatcaaatctagacagaagcattctcagaaacgtctttgtgatgtttacattcaactcatagagttgaacattcccttgcagagagcagctttgaagcactctttttgtagcatgtgcaagtggacatttggagcgctctgaggcctacggggaaaaagcaaatatcttcccataaccaatagacagaaacattctcagaaacttctttatgacgtatgtactcaactagcagagaagaactttccttttgacagagcatttttgatacattctttttgtagtatctgcaagtggatatttggatagctgtgaagatttcgttggaaaccggaatatcttcctataaagtctggacagaagcatcctcagaaacttctttgtgatgtgtgcattcaagtcacagagttgaacattgcctttcatagagcaggtttcaaacactctttttttactatatggaagtggacgtttcggacggtttgaggaccatggtgataaaggaaatatcttcccctacaagctagaaagaagcattctgtgaaacttgtttgtgatgtgtgtactcaactaatagatttgaacctttctttttacagagcagttttgaaacactctttttgtagaatctgcgaggggatatttggatagatttcaggatttcgttggaaacgggaatatcttcatataaaatctcgacagaagcattctcagaaacttctttgtgatatgtgcattcaagtcacagagttcaatgttccctttcacagagtaggtttgaaacactctttttgtagtatctggaagtggacatttggagcgccttgacgcctacggtgaaaagggcaaatatcttctcataaaaagtagacagaagcaatctcagaatcttctttgggatatatgtacgcagctaacagagttgaacctttctattgacagagcagttttgaaacagtctttctgtggaaactgcaagtggatatttggatagcttggaggatttcgttggaaacgggattacgtataaaaagtagacagcagcatcctcagtaaacttctttgtgatgtgtgcattcaagtcacagagttgaacattccctttcgtacagcagttttgaaacactctttctgtagtatctggaagtgaacattaggacagctttcaggactatggtgagaaaggaaatatcttcaaataaaaactagacagaagcattctcataaacttgtttgtgatgtgtgaactcagctaacagaggtggatctttgttttgatagagcagttctgaaaaacactttttgttgaatctgcaagtggacatttggatagatttgaagatttcgttggaaacgggaatatcttcatatcaaatctagacagaagcattctcagaaacggctttgtgatgtttgcattcaactcatagagttgaacattccctttcagagtgcagctttgaagaactctttttgtggtatgtgcaagtggacaattggagcgctttgaggcctacggggaaaaagcaaatatctcccataaccactagacagaaacattctcagaaactcctttatgacgtatgcactcacctaacagaaaagaaccttccttttcacagagcagttttgatacactctttttgtagaatctgcaagtggatatttggatagctgtgaagatttcgttggaaacgggaatatcttcctataaaatctagacagaagcattctcagaaactgctctgtgatgtctgcattcaagtcacagagttgaacattgcctttcatagagcaggtttggaacgctctttttgtagtatatggaaccggatgtttccgacggttggaggcccatggtgataaagggaatatcttcccctacaagctagaaagaagcattgtgtgaaacttatttgtgatgtgtgtactcaactaacagagttgaacctttctttttacagagcagttttgaaacactctttttgtagaatctgcgaggggatatttggatacatttcaggatttcgttggaaacgggaatatcttcatataaaatcctcgacagaagcattctcagaaacttctttgtgatatgtgcattcaagtcacagagttgaatattcgctttcacagagtaggtttgaaacactctttttgtagtatctggaagtggacatttggagcgccttgatgcctacggtgaaaagggaaatatcttcccataaaaactagacagaagcaatctcagaatcttctttgggatatatgcacgcagctaacagagttgaacctttctattgacagagcagttttgaaacagtctttctgtggaatctgcaagtgaatatttggatagcttggaggatttcgttggaaacgggattaagtataaaaagtagacagcagcatcctcagaaacatccttgtgatgtgtgcattcaagtcacagagttgaacattccctttcgtacagcagttttgaaacactctttctgtagtatctggaagtgaaatttaggagagctttcaggtctatagtgagaaaggatatatcttcaaataaaaactagacagaagcattctcataaacttgtttgtgatgtgtgaactcagctaacagaggtggatctttcttttgatagagcacttctgaaaaacactttttgttgaatctgcaagtggacatttggatagatttgaagatttcgttggaaacgggaatatcttcatatcaaatctagacagaagcattctcagaaacgtctttgtgatgtttgcattcaactcatagagttgaacattctctttcagagagcagctttgaagcactctttttgtagtatgtgcaagtggatatttggagcgctctgaggcctacggtggaaaagcaaatatcttcccataaccactagacagaaacattctcagaaactcctttatgacgtatgcactcacctaacagagaagaaccttccttttgacagagcggttttgatacactctttttgtagaatctgcaagtggatatttggatagctgtgaagatttcgttggaaacgagaatatcttcctataaaatctagacagaagcattctcagaaactgctctgtgatgtctgcattcaagtcacagagttgaacattgccgttcatagagcaggtttgaaacactctttttgtagtatatggaagtggacgtttcggacggtttgaggcccatggtgataaagggaatatcttcccctacaagctagaaaagaagcattctgtgaaacttgtttgtgatgtgtgtactcaactaacagagttgaacctttctttttacagagcagttttgaaaccctctttttgtagaatctgcgaggggatatttggatagatttcaggatttcgttggaaacgggaatatcttcatataaaatctcgacagaagcattctcagaaacttctttgtgatatgtgcattcaagtcacagagttgaatattccctttcacagactaggtttgaaaaaccctttttgtagtagtctggaagtggacatttggagcgccttgatgcctacggtgaaaagggaaatatcttcccataaaaactagacagaagcaatctcagaatcttctttgggatatatgcacgcagctaacagagttgaacctttctattcacagagcagttttgaaacagtctttctgtggaatctgcaagtggatatttggatagcttggaggatttcgttggaaacgggattacgtataaaaagtagacagcagcatcctcagaaacttctttgtgatctgtgcattcaagtcacagagttgaacattccctttcgtacagcagttttgaaacactctttctgtagtaactggaagtgaacattaggacagctttcaggtctatggtgagaaaggaaatatcttcaaataaaaactagacagaagcattctcataaacttgtttgtgatgtgtgaactcagctaacagaggtggatctttcttttgatagagcagttctgaaaaacactttttgttgaatctgcaagtggacatttgaatagatttgaagatttcgttggaaacgggaatatcttcatatcaaatctagtcagaagcattctcagaaacgtcgttgtgatgtttgcattcaactcatagagttgaacattccgattcagagagcagctttgaggcactctttttgtagtatgtgcaagtggatatttggagcgctctgaggccttcggtgaaaaagcaaatatcttcccataaccactagatggaaacattctcagaaactcgtttatgacgtatgcactcacctaacagagaagaaccttccatttgacagagcagttttgatacactctttttgtagaatctgcaagtggatatttggatagctgtgaagattttgctggaaacgggaatatcttcctataaaatactagacagaagcattctcagaaactgctctgtgatgtctgcattcaagtcacagagttgaacattgcctttcctagagcaggtttgaaacgctctttttgtagtatatggaagtggacgtttcggacggtttgaggaccatggtgataaagggaatatcttcccctacaagctagaaagaagcattctgtgaaacatgtttgtgatgcgtgtactcaactaacagagttgaacctttctttttacagagcagttttgaaacactctttttgtagaatctgcgaggggatatttggatagatttcaggatttcgttggaaacgggaatatcttcatataaaatctcgacagaagcattctcagaaacttctttgtgatatgtgcattcaagtcacagagttgaatattccgtttcacagagtaggtttgaaacactctttttgtagtatctggaagtggacatttggagcgccttgacacctacggtgaaaagggaaatatcttcccataaaaactagacagaagcaatctcagaatcttctttgggatatatgcacgcagctaatagagttgaacctttctattgacagagcagttttgaaacagtctttctgtggaatctgcaagtggatatttggatagcttggaggatttcgtaggaaacgggattacgtatagaaagtagacagcagcatcctcagaaacttctttgtgatgtgtgcattcaagtcacagagttgaacattccctttcgtacagcagttttgaaacactctttctgtaatatctggaagtgaacattaggacagctttcagctctatggtgagaaaggaaatatcttcaaataaaaactagacagaaagcattctcaagaacttgtttgtgatgtgtgaactcagctaacagaggtggatgtttcttttgatagagcagttctgaaaaacacgttttgttgaatctgcaagtggacatttggatagatatgaagatttcgttggaaacgggaatatcttcatatcaaatctagacagagcattctcagaaacgtctttgtgatgtttgcattcaactcatagagttgaacattccctttcagagagcagctttgaagcactctttttgtagtatgtgcaagggggtatttggagcgctctgaggcctaaggtgaaaaagcaaatatcttcccataaccactagacagaaacattctcagaaactcctttatgacgtgtgcactcacctaacagagaagaaccttccttttgacagagcatttttgatacacactttttgtagaatctgcaagtggatatttggatagctgtgaagatttcgttggaaacgggaatatcttcctataaaatctagacagaagcattctcagaaactgctctgtgatgtctgcattcaagtcacagagttgaactctgcctttcctagagcaggtttgaaacgctctttttgtagtatatggaagtggacgtttcggacggtttgaggcccatggtgataaagggaatatcttcccctacaagctagaaagaagcattctgtgaaacttgtttgtgatgtgtgtactcaactaacagagttgaacctttctttttacagagcagttttgaaacactctttttgtagaatatgcgaggggatatttggatagatttcaggatttcgttggaaacgggaatatcttcatataaaatctcgacagaagaccgaagcattctcagaaacttcattgtgatatctgcattgaagtcacagacttgaatactccctttcacagagtaggtttgaaacactctttttgtagtatctggaattggacatttggatcgctttgacgcctattgtgaaaaaggaaatatcttcccctaaaaactagacagaagcaatctcagaatcttctttgggatatatgcacgcagctaacagagttgaacctttctattgacagagcagtttagaaacagtctttctgtggaatctgcaagtggatatttggatagattggaggatttctttggaaacgggattacgtataaaaagtagacagcagcatcctcagaaacttctttgtgatgtgtgcattcaagtcacagagttgaacattccctttcgtacagcagttttgaaacgctctttctgtagtatctggaagtgaacattaggacagctttcaggtctatggtgagaaaggaaatatcttcaaataaaaactagacagaagcattctcataaacttgtttgtgatgtgtgaactcagctaacagaggtggatctttcttttgatagagcagttctgaaaaacactttttgttgaatctgcagtggacatttggatagatttgaagatttcgttggaaacgggaatatcttcatatcaaatctagacagaagcattctcagaaacgtctttgtgatgttggcattcaactcatagagttgaacattccgtttcagagagcagctttgaggcactctttttgtagtatgtgcaaggggatatatggagcgctctgaggcctaaggtgaaaaagcaaatatcttcccataaccactagacagaaacattctcagaaactcctttatgacgtttgtactcaactaacagagaagaaccttccttttgacagagcagttttgatacactctttttgtagaatctgcaagtggatatttggatagctgtgaagatttcgttggaaacgggaatatcttcctataaaatctagacagaagcattctcagaaactgctctgtgatgtctgcattcaagtcacagagttgaacattgcctttcatagagcagttttgaaatgctctttttgtagtatatggaagtggacgtttcggacggtttgaggcccatggtgataaaggaaatatcttcgctacaagctagaaagaagcattctgtgaaacttgtttgtgatgtgtgtactcaactaacagagttgaacctttctttttacagagcagttttgagacactctttttgtagaatctgcgaggggatatttggatagatttcaggatttcgttggaacgggaatatcttcatataaaatctcgacagaagcattctcagaaacttctttgtgatatctgcctttaagtcacagagttgaatattccctttcacagagtaggtttgaaacactctttttgtagtatctggaagtggacatttggagccccttgagacctacggtgaaaagggaaatatcttcccataaaaacaagacagaagcaatctcagaattttctttgggatatatgcacacagctaacagagttgaacttttctattgacatagcagttttgaaacagtctttctgtggaatatgcaagtggatatttggatagcttggaggatttcgttggaaacgggattatgtataaaaagtagacagcagcatcctcagaaacatctttgtgatgtgtgcattcaagtcacagagttgaacattccctttcgtacagcagttttgaaacactctttctgtagtatctggaagtgaacattaggacagctttcaggtctatggtgagaaaggaaatatcttcaaataaaaactagacagaagcattctcataaacttgtttgtgatgtgtgaactcagctaacagaggtggatctttcttttgatagagcagttctgaaaaacactttttgttgaatctgcaagtcgacatttggatagatttgaagatttcgttggaaacgggaatatcttcatatcaaatctagacagaagcattctcagaaacgtctttgcgatgtttgcattcaactcatagagttgaacattccgtttcagagagcagctgtgaggcactctttttgtagtatgtgcaagtggatatttggagcgctctgaggcctacggtgaaaaagcaaatatcttcccataaccactacacagaaacattctcagaaactcctttatgacgtatgtactcaactaacagagaagaaccttccttttgacagagtagttttgatacactctttttgtagaatctgcaagtggatatttggatagctgtgaagatttcgttggaaacgggaatatcttcctataaaatctagacagaagcattctcagaaactgctatctgatgtctgcattcaagtcacagagttgaacattgcttttcatagagcaggtttgaaacgctctttttgtagtatatggaagtagacgtttcggacggtttgaggcccatggtgataaagggaatatcttcccctacaagctagaaagaagcattctgtgaaacttgtttgtgatgtgtgtactcaactaacagagttgaacctttctttttatagagcagttttgaaacactctttttgtagaatctgcgaggggatatttggatagatttcaggatttcgttggaaaggggaatatcttcatataaaatctcgacagaagcattctcagaaagcttctttgtgatatgtgcattcaagtcacagagttcaatattccctttcacagagtaggtttgaaacactctttttgtagtatctggaagtggacatttggagcgccttgacgcctacggtgaaaagggaaatatcttctcataaaaagtagacagaagcaatctcagaatcttctttgggatatatgcacgcagctaacagagttgaacctttctattgacagagcagttttgaaacagtctttctgtggaatctgcaagtggatatttggatagcttggaggatttcgttggaaatgggattaagtataaaaagtagacagcagcatcctcagaatcttctttgtgatgtgtgcattcaagtcacagagttgaacattccctttcgtacagcagttttgaaacactctttctgtagtatctgggagtgaacattaggacagctttcaggtctatggttagaaaggaaatatcttcaaataaaaactagacagaagcattctcataaacttgtttgtgatgtctgaactcagctaacagaggtggatctttcttttgatagagcagttctgaaaaacactttttgttgaatctgcaagtggacatttggatagatttgaagatttcgttggaaacgggaatatcttcatatcacatctagacagaagcattctcagaaacgtctttgcgatgtttgcattcaactcatagagttgaacattccctttgagagagcagatttgaagcactctttttgtagcatgtgcaagtggacatttggagcgccctgaggcctacggggaaaaagcaaatatcttcccataaccactagacagaaacattctcagaaacttctttatgacgtatgtactcaactagcagagaagaactttccttttgacagagcatttttgatacactctttttgtactatctgcaagtggatatttggatatctgtgaagatttcgttggaaacgggaatatcttcctataaagtctggacagaagcattctcagaaactgctctgtgatgtctgcattcaagtcacagagttgaacattgcctttcatagagcaggtttgaaacgctctttttgtagtatatggaagtggacgtttcggacggtttgaggcacatggtgataaagggaatatcttcccctacaagctagaaagaagcattctgtgaaacttgtttgtgtgtactcaactaacagagttgaacctttcttttcacagagcagttttgaaacactctttttgtagaatctgcgaggggatatttggatacatttcaggatttcgttggaaacgggaatatcttcatataaaatctcgacagaagcattctcagaaacttccttgtgatatgtgcattcaagtcacagagttgaatattccctttcacagaggaggtttgaaacactctttttgtagtatctggaagtggacatttggagcgccttgacgcccacggtgaaaagggaaatatcttcccataaaaactagacagaagcaatctcagaatcttcttcgggatatatgcacgcagctaacagagttgaacctttctattgacagagcagttttgaaacagtctttctgtggaatctgcaagtggatatttggatagcttggaggatttcgttggaaacgggattacgtataaaagtagacagcagcatcctcagaaacttctttgtgatgtgtgcattcaagtcacaaagttgaacattccctttcgtacagcagttttgaaacactctttctgtagtatctggaagtgaacattaggacagctttcaggtctatgatgagaaaggaaatatcttcaaataaaaactagacagaagcattctcataaacttgtttgtgatgtgtgaactcatctaacaggggtggatctttcttttgatagagcagttctgaaaaacactttttgttgaatctgcaagtggacatttggatagatttgaagatttcgttggaaacgggaatatcttcatatcaaatctagacagaagcattctcagaaacgtctttgtgatgtttgcattcaactcatagagttgaacattccgtttcagagagcagctttgaagcactctttttgtagtatgtgcaagtggatatttggagcgctcttaggcctacggggaaaaagcaaatatcttcccataaccactagacagaaacattctgagaaactcctttatgacgtatgcactcacctaaccgagaagaaccttccttttgacagagcagttttgatacactctttttgtagaatctgcaagtggatatttggatagctgtgaagatttcgttggaaacgggaatatcttcctataaaatctagacagaagcattctcagaaactgctctgtgatgtctgcattcaagtcacagagttgaacattgcctttcatagagcaggtttgaaaccctctttttgtagtatatggaagtggacgtttcggaaggtttgaggcccatgttgataaagggaatatcttcccctacaagctagaaagaagcattctgtgaaacttgtttgtgatgtttgtactcaactaacagagttgaacctttctttttacagagcagttttgaaacactctttttgtagaatctgcgaggggatatttggatacatttcaggatttcgttggaaacgggaatatcttcatataaaatctcgacagaagcattctcagaaacttctttgtgatatgtgcattcaagtcacagagttgaatattccctttcacagagtaggtttgaaacactgtttttgtagtatctggaagtggacatttggagcgccttgacacctacggtgaaaagggaaatatcttcccataaaaactagacagaagcaatctcagaatcttctttgggatatatgcacgcagctaacagagttgaacctttctattgacagagcagttttgaaacagtctttctgtggaatctgtaagtggatatttggatagcttggaggatttcgttggtaacgggattacgtataaaaattagacagcagcatcctccgaaacttctttgtgatgtgtgcattgaagtcacagagttgaacattccctttcgtacagcagttttgaaacactctttctgtagtatctggaagtgaacattaggacagctttcagctctatggtgagaaaggaaatatcttcaaataaaaactagacagaagcattctcataaacttgttcgtgatgtgtgaactcagctaacacacgtggatctttcttttgatagagcagttctgaaaaacactttttgttgaatctgcaagaggacatttggatagatttgaagatttcgttggaaacgggagtatcttcatatcaaatctagacagaagcattctcagaaacgtctttgtgatgtttgcattcatctcatagagttgaacattccgtttcagagagcaggtttgaagcactctttttgtagtatgtgcaagtggatatttggagcgctctgaggcctacggtgaaaaagcaaatatcttcccataaccactagacagaaacattctcagaaactcctttatgacgtatgtactcaactgacagagaagaactttccttttgacggagcatttttgatacactctttttgtactgtctgcaagtggatatttggatagctgtgaagatttcgttggaaacgggaatatcttcctataaaacctagacagaagcattctcagaaactgctctgtgatgtctgcattcaagtcacagagttgaacattgcctttcatagagcaggtttgaaacgctctttttgtagtatattgaagtggacttttcggacggtttgaggcccatggtgataaagggaatatcttcccctacaagctagaaagaagcattctgtgaaacttgtttgtgatgtgtgtactcaactaacagagttgaacctttctttttacagagcagttttgaaacactctttttgtagaatctgcgaggggatatttggatagatttcaggatttcgttggaaatgggaatatcttcatataaaatctcgacagaaagcattctcagaaacttccttgtgatatgtgcattcaagtcacagagttgaatattccctttcacagagtaggtttgaaacactctttttgtagtatctggaagtggacatttggagcgccttgacgcctacggtgaaaagggaaatatcttcccataaaaattagacagaagcaatctcagaatcttctttgggatatatgcacgcagctaacagagttgaacctttctattgacagaacagttttgaaacagtctttctgtggaatctgcaagtggatatttggatagcttggaggatttcgttggaaacgggattacgtagaaaaagtagacagcagcatcctcagaaacttctttctgatgtgtgcattcaagtcacagagttgaacattccctttcgtacagcagttttgaaacactctttctgtagtatctggaagtgaacattaggacagctttcagctctatggtgagaaaggaaatatcttcaaataaaaactagacagaagcattctcataaacttgtttgtgatgtgtgaactcagctaacagaggtggatctttcttttgatagagcagttctgaaaaacactttttgttgaatctgcaagtggacatttggatagatttgaagatttcgttggaaacgggaatatcttcatatccaatctagacagaagcattctcagaaacgtctttgtgatgtttgcattcaactcatagagttgaacattccgtttcagagagcagctttgaggcactctttttgtagtatgtgcaagtggatatttggagcgctctgaggcctacggtgaaaaagcaaatatcttcccataaccactagacagaaaacattctcagaaactcctttatgacgtatgcactcacctaacagagaagaaccttccttttgacagagcagttttgatacactctttttgtagaatctgcaagtggatatttggatacctgtgaagatttcattggaaacgggaatatcttcctataaaatctagacagaagcattctcagaaactgctctgtgatgtctgcattcaagtcacagagttgaacattgcctttcatagagcaggtttgaaacgctctttttgtagtatatggaagtggatgtttcggacggttggaggcccatggtgataaagggaatattcttcctctacaagctagaaagaagcattctgtgaaacttgtttgtgatgtgtgtactcaactaacagagttgaacctttcttttacagagcagttttgaaacactctttttgtagaatctgcgaggggatatttggatagatttcaggatttcgttggaaacgggaatatcttcatataaaatctcgacagaagcattctcagaagcttctttgtgatatgtgcattcaagtcacagagttgaatattccctttcacagagtaggtttgaaacactctttttgtagtatctggaagtggacatttggagcaccttgacgcctacggtgaaaagggaaatatcttctcatgaaaagtagacagaagcaatctcagaatcttctttgggatatatgcacgcagctaacagagttgaacctttctattgacagagcagttttgaaactgtctttctgtggaatctgcaagtggatatttggataccttggaggatttcgttggaaacgggattacgtataaaaagtagacagcagcatcctcagaaacttctttttgatgtgtgcattcaagtcacagagttgaacattccctttcatacagcagttttgaaacactctttctgtagtatctggaagtgaacattaggacagctttcaggtctatggtgagaaaggaaatatcttcaaataaaaactagacagaagcattctcataaacttgtttgttatgtgtgaactcagctaacacacgtggatctttcttttgatagagcagttctgaaaaacaatttttgttgaatctgcaagtggacatttggatagatttgaagatttcgttggaaacgggaatatcttcatatcaaatctagacagaagcattctcagaaacgtctttgtgatgtttgcattcaactcatagagttgaacattccctttcagagagcagctttgaagcactctttttgtagtatgtgcaagtggatattttgagcgctctgaggcctacggtgaaaaagcaaatatcttcccataaccactagacagaagcattctcagaaactgctctgtgatgtctgcattcaactcacggagttgaacattgcctttcatagagcaggtttgaaacgctctttttgtagtatatggaagtggacgtttcggacggtttgaggcccatggtgataaagggaatatcttcccctacaagctagaaagaagcattctgtgaaacttgtttgtgatgtgtgtactcaactaacagagttgaacctttctttttacagagcagttttgaaacactctttttgtagaatctgcgaggggatatttggatagatttcaggatttcgttggaaacgggaataccttcatataaaatctcgacagaagcattctcagaaacttccttgtgatatgtgcattcaagtcacagagttgaatattccctttcacagagtaggtttgaaacactctttttgtagtatctggaagtggacatttggagcgccttgatgcctacggtgaaaagggaaatatcttcccataaaaactagacagaagcaacctcagaatgttctttgggatgtatgcacgcagctaacagagttgaacctttctattgacagagcggttttgaaacagtctttttgtggaatctgcaagtggatatttggatagcttggaggatttcgttggaaacgggattacgtataaaaagtagacagcagcatcctcagaaccttctttgtgatgtgtgcattcaagtcacagagttgaacattccctttcgtacagcagttttcaaacactctttctgtagtatctggaagtgaacattaggacagctttcagctctatggtgagaaaggaaatatcttcaaataaaaactagacagaagcattgtcataaacatgtttgtgatgtgtgaactcagctaacagaggtggatctttcttttgatagagcagttctgaaaaacactttttgttgaatctggaagtggacatttggatagatttgaagatttcgttggaaacgggaatatcttcatatcaaatctagacagaagcatactcagaaacgtctttgtgatgtttgcattcaactcatagagttgaacattccgtttcagagagcagctttgaagcactctttttgtagtatgtgcaagtggatatttggagcgctctgaggcctacggtgaaaaagcaaatatcttcccataaccactagacagaaacattctcagaaactcctttatgacgtatgcactcacctaacagagaagaaccttccttttgacagagcacttttgatacactctttttgtggaatctgacagtggatatttggatagctgtgaagatttcgttggaaacgggaatatcttcctataaaatctagacagaaggattctcagaaactgctctgtgatgtctgcattcaagtcacagagttgaacattgcctttcatagagcatgtttgaaaggctctttttgtagtatatggaagtggacgtttcggacggtttgaggcccatggtgataaagggaatatcttcccctacaagctagaaagaagcattctgtgaaacttgtttgtgatgtgtgtactcaactaacagagttgaacctttctttttacagagcagttttgaaacactctttttgtagaatctgcgaggggatatttggatagatttcaggatttcgttgtaaacgggaatatcttcatataaaatctcgacagaagcattctcagaaacttctttgtgatatctgccttcaagtcacagagttgaatattccctttcacagagtaggtttgaaacactctttttgtagtatctggaagtggacatttggagcgccttgacgcctacggtgaaaagggaaatatcttcccataaaaactagacaaaagcaatctcagaatcttctttgggatatatgcacgcagctaacagagttgaacctttctattgacagagcagttttgaaacagtctatctgtggaatctgcaagtggatatttggatagcttggaggatttcgttggaaacgggattacgtataaaaagtagacagcagcatcctcagaaacttctttgtgatgtgtgcattcaagtcacatagttgaacattccctttcatacagcagttttgaaacactctttctgtagtatctggaagtgaacattaggacagctttcagctctatggtgagaaaggaaatatcttcaaataaaaactagacagaagcattctcataaacttgtttgtgatgtgtgaactcagctaacagaggtggatctttcttttgatatagcagttctgaaaaacactttttgttgaatctgcaagtggacatttggatagatttgaagatttcgttggaaacgggaatatcttcatatcaaatctagacagaagcattctcagaaacgtctttgtgatgtttgcattcaactcatagagttgaacattccctttcagagagcaggtttgaagcactctttttgtagtatgtgcaagtggacatttggagcgctctgaggcctacggtgaaaaagcaaatatcttcccataaccactagacagaaacattctcagaaactcctttatgacgtatgcactcacctaacagagaagaaccttccttttgacagagcagttttgataaactcattttgtagaatctgcaagtggatatttggatagctgtgaagatttcgctggaaacgggaatatcttcctataaaatctagacagaagcattctcagaaactgctctgtgatgtctgcattcaagtcacagagttgaacattgcctttcatagagcaggtttgaaacgctctttttgtagtatatggaagtagacgtttcggacggtttgaggcccaatggtgataaagggaatatcttcccctacaagctagaaagaagcattctgtgaaacttgtttgtgatgtgtgtactcaactaacagagttgaacctttctttttacagagcagttttgaaacactctttttgtagaatctgcgaggggatatttggatagatttcaggatttcgttggcaacgggaatatcttcatataaaatctcgacagaagcattctcagaaacttcttggtgatatctgcattgaagtcacagagttgaatattccctttcacagagtaggtttgaaacactctttttgtagtatctagaagtggacttttggagcgccttgacgcctatggtgagaagggaaatatcttcccataaaaactagacagaagcaatctcagaatcttctttgggatatatgcacgcagctaacagagttgaacctttccattgacagagcagttttgaaacagtctttctgtggaatctgcaagtggatatttggatagcttggaggatttcgttggaaacgggattaagtataaaaagtagacagcagcatcctcagaaacttctttgtgatgtgtgcattcaagtcacagagttgaacattccctttcgtacagcagttttgaaaaactctttctgtagtatctggaagtgaacattaggacagctttcagctctatggtgagaaaggaaatatcttcaaataaaaactagacagaagcattctgataaacttgtttgtgaagtgtgatctcagctaacagaggtggatctttcttttgatagagcagttctgaaaaacactttgttgaatctgcaagtagacatttggatagatttgaagatttcgttggaaacgggaatatcgtcataaatctagacagaagcattctcagaaacgtctttgtgatgtttgcattcaactcatagagttgaacattccgtttcagagaccagctttgaagcactctttttgtagtatgtgcaagtggatatttggagcgctctgaggcctacggtgaaaaagcaaatatcttccgataaccactagacagaaacattctcagaaactcctttatgacgtatgtactcaactaacagagaagaaccttccttttgacagagcagttttgataaactctttttgtagaatctgcaagtggatatttggatagctgtgaagatttcgttggaaacgggaatatcttcctataaaatctagacagaagcattctcagaaactgctctgtgatgtctgcattcaagttacagagttgaacgttgcctttcatagagcaggtttgaaacgctctttttgtagtatatggaagtggacttatcggacggtttgaggcccatggtgataaagggaatatcttcccctacaagctagaaagaagcattctgtgaaacttgtttgtgatgtgtgtactcaactaacagagttgaacctttctttttacagagcagttttgaaacactctttttgtagaatctgcggggggaaatttggatagatttcaggatttcgttggaaacgggaatatcttcatacaaaatctcgacagaagcattctcagaaacttctttgtgatatgtgcattcaagtcacagagttgaatattccctttcacagggtaggtttgaaacactctttttgtagtatctggaagtggacatttggagcgccttgacgcctacggtgaaaagggaaatatcttcccataaaaactagacagaagcaatctcagaatcttctttgggatatatgcacgcagctaacagagttgaacctttctattgacagaggagttttgaaacagtctttctgtggaatctggaagtggatatttggatagcttggaggatttcgttggaaacgggattacatataaaaagtagacagcagcatcctcagaaacttctttgtgatgtgtgcattcaagtcacagagttcaacattccctttcgtacagcagttttgaaacactctttctgtagtatctggaagtgaacattaggacagctttcagctctatggtgagaaaggaaatatcttcaaataaaaactagacagaagcattctcataaagttgtttgtgaggtgtgaactcagctaacagaggtggatctttcttttgatagagcagttctgaaaaacactttttgttgaatctgcaagtggacatttgcatagatttgaagatttcgttggaaacgggaatatcttcatatcaaatctagacagaagcattctcagaaacgtctttgcgatgtttgcattcaacccatagagttgaacattccgtttcagagagcagctgtgaggcactctttttgtagtatgtgcaagtggatatttggagcgctctgaggcctacggtgaaaaagcaaatatcttcccataaccactagacagaaacattctcagaaactcctttatgaagtatgcactcacctaacagagaagaaccttccttttcacagagcagttttgatacactctttttgtagaatctgcaagtggatatttggatagctgtgaagatttcgttggaaacgagaatatcttcctataaaatctagacagaagcattcccagaaactgctctgtgatgtctgcattcaagtcacagagttgaacattgcctttcatagagcaggtttgaaacactctttttttagtatatggaagtggacgtttcggacggtttgaggaccatggtgataaaggaaatatcttcccctacaagctagaaagaagcattctgtgaaacttgtttgtgatgtgtgtactcaactaacagagttgaacctttcttttcacagagcagttttgaaacactctttttgtagaatctgcgaggggaaatttggatagatttcaggatttcgttggaatcgggaatatcttcatacaaaatctcgacagaagcattctcagaaacttctttgtgatatctgcattcaagtcacagagttgaatattccctttcacagagtaggtttgaaacactctttttgtatacctggaagtggacatttggagcgccttgacgcctatggtgaaaagggaaatatcttcccataaaaactagacagaagcaatctcagaatcttctttggaatatatgcacgcagctaacagagttgaacctttctattgacagagcagttttgaaacagtctttctgtggaatctgcaagtggatatttggatagcttggaggatttcgttggaaacgggattacgtataaaaagaagacagcagcatcctcagaaacttctttgtgatgtgtgcattcaagtcacagagttgaacattccctttcgtacagcagttttgaaacactctttctgtagtatctgtaagtgaacattaggacagctttcaggtctatggtgagaaaggaaatatcttcaaataaaaactagacagaagcattctcataaacttgtttgtgatgtgtgaactcatctaacagaggtggatctttcttttgatagagcagttctgaaaaacactttttgttgaatctgcaagtggacatttggatagatttgaagatttcgttggaaacgggaatatcttcatatcaaatatagacagaagcattctcagaaacgtctttgtgatgtttgcattcaactcatagtgttgaacattccctttcagagagcagatttgaagcactctttttgtagtatgtgcaagtggatatttggagcgctctgaggcctacggtgaaaaagcaaatatcttcccataaccactagacagaaacattctcagaaactcctttatgacgtatgcactcacctaacagaaaagaaccttccttttgacagagcagttttggtacactctttttgtagaatctgcaagtggatatttggatagctgtgaagatttcgttggaaacgggaatatcttcctataaaatctagacagaagcattctcagaaactgctctgtgatgtctgcattcaagtcacagagttgaacattgcctttcatagagcaggtttgaaacactctttttgtagtatatggaagtggacatttcggacggtttgaggcccatggtgataaagggaatatcttcccctacaaggtagaaagaagcattctgtgaaacttgtttgtgatgtgtgtactcaactaaaagagttgaacctttctttttacagagcagttttgaaacactctttttgtagaatctgcgaggggatatttggatagatttcaggatttcgttgcaaacgggaatatcttcacataaaatctcgacagaagcattctcagaaacttcctttgtgatatgtgcattcaagtcacagagttgaatattccctttcacagagtaggtttgaaacactctttttgtagtatctggaagtggacatttggagcgccttgacgcctacggtgaaaagggaaatatcttcccataaaaactagacagaagcaatctcagaatcttctttgggatatatgcacgcagctaacagagttgaacctttctattgacagagcagttttgaaacagtctttctgtggaatctgcaagtggatatttggatagattggaggatttcgttggaaacgggattacgtataaaaattagacagcagcatcctcagaaacttccttgtgatgtgtgcattcaagtcacagagttgaacattccctttcgtacagcagttttgaaacactctttctgtagtatctggaagtgaactttaggagagctttcaggtctatagtgagaaaggaaatatcttcaaataaaaactagacagaagcattctcataaacttgtttgtgatgtgtgaactcagctaacagaggcggatctttcttttgatagagcagttcggaaaaacactttttgttgaatctgcaagtggacatttcgatagatttgaagatttcgttggaaacgggaatatcttcatatcaaatctagacagaagcattctcagaaacgtctttgtgatgtttgcattcaactcatagagttgaacattccctttcagagagcagctttgaagcactctttttgtagtctgtgcaagtggatatttggagcgctgtgaggcctacggtgaaaaagcaaatatcttcccataaccactagacagaaacattctcagaaactcctttatgacgtatgcactcacctaacagagaagaaccttccttttgacagagcagttttgatacactctttttgtagaatctgcaagtggatatttggatagctgtgaagatttcattggaaacgggaatatcttcctataaaatctagacagaagcattctcagaaactgctctgtgatgtctgcattcaagtcacagagttgaacattgcctttcatagagcaggtttgaaacactctttttgtagtatatggaagtggacgtttcggacagtttgaggcccatggtgataaagggaatatcttcccctacaagctagaaagaagcattctgtgaaacttgcttgtgatgtgtgtactcaactaacagagttgaacctttctttttacagagcagttttgatacactctttttgtagaatctgagaggggatatttggatagatttcaggatttcgttggaaacgggaatatcttcatataaaatatcgacagaagcattctcagaaacttctttgtgatatctgcctttaagtcacagagttgaatattccctttcacagagtaggtttgaaacactctttttgtagtatctggaagtggacatttggagccccttgagacctacggtgaaaagggaaatatcttcccataaaaactagacagaagcaatctcagaatcttctttgggatatatgcacgcagctaacagagttgaacctttctattgacagagcagttttgaaacagtctttctgtggaatctgcaagtagatatttggatagcttggaggatttcgttggaaacgggattacgtatgaaaagtagacagcagcatcctcagaaacttctttgtgatgtgtgcattcaagtcacagagttgaacattccctttcgtacagcagttttcaaacactctttctgtagtaactggaagtgaacattaggacagctttcaggtctacggtgagaaaggaaatatcttcaaataaaaactagacaaaagcattctcataaacttgtttgtgatgtgtgaactcagctaacagaggtggatctttcttttgatagagcagttctgaaaaacactttttgttgaatctgcaagtggacatttggatagatttgaagatttcgttggaaacgggaatatcttcatgtcaaatctagacagaagcattctcagaaacgtctttgcgatgtttgcattcaactcatagagttgaacattccgtttcagagagcagctttgaggcactctttttgtagtatgtgcaagtggatatttggagcgctctgaggcctacggtgaaaaagcaaatatcttcccataaccactagacggaaacattctcagaaactcctttatgacgtatgcactcacctaacagagaagaaccttccttttgactgagcagtttttatacactctttttgcagaatctgcaagtggatatttggatagctgtgaagatttcgttggaaacgggaatatcttcctataaaatctagacagaagcattctcagaaactgctctgtgatgtctgcattcaagtcacagagttgaacattgcctttcatagagcaggtttgaaacgctctttttgtagtgtatggaagtggatgtttcggacggttggaggcccatggtgataaagggaatatcttcccctacaagctagaaagaagcattctgtgaaacttgtttgtgatgtgtgtactcaactaacagagttgaacctttctttttacatagcagttttgaaacactctttttgtagaatctgcgaggggatatttggatagatttcaggattccgttggaaacgggaatatcttcatataaaatctcgacagaaagcattctcagtaaacttctttgtgatatctgcattcaagtcacagagttgaatattccctttcacagagtaggtttgaaacactctttttgtagtatctggaagtggacattttgagcgccttgacgcctacggtgaaaagggaaatatcttctcataaaaagtagacagaagcaatctcagaatcttcttcgggatatatgcacgcaggtaacagagttgaacctttctattgacagagcagttttgaaacagtctttctgtggaatctgcaagtggatatttggatagcttggaggatttcgttggaaacgggattacgtataaaaagtagacagcagcctcctcagaaacttctttgtgatgtgtgcattcaagtcacacagttgaacattccctttcgtacagcagttttgaaacactctttctgtagtatctggaagtgaacattaggacagctttcaggtctatggtgagaaaggaaatatcttcaaataaaaactagacagaagcattctcataaacttgtttgtgatgtctgaactcagctaacagacgtggatctttcttttgatagagcagttctgaaaaacacgttttgttgaatctgcaagtggacatttggatagatttgaagatttcgttggaaacgggaatatcgtcatatcaaatctagacagataagcattctcagaaacgtctttgcgatgtttgcattcaactcatagagttgaacattccgtttcagagagcagctttgaggcactctttttgtagtatgtgcaagtggatatttggagcgctctgaggcctacggtgaaaaagcaaatatcttcccataaccactagacagaaacattctcagaaactcctttatgacgtatgcactcacctaacagagaagaaccttccttttgacagagcagttttgatacactctttttgtagaatctgcaagtggatatttggatagctgtgaagatttcgttggaaacgggaatatcttcctataaaacctagacagaagcattctcagaaactgctctgtgatgtgtgcattcaagtcacagagttgaacattggctttcatagagcaggtttgaaatgctctttttgtagtatatggaagtggacgtttcagacggtttgaggcccatggtgataaagggaatatcttcccctgcaagctagaaagaagcattctgtgaaactagtttgtgatgtgtgtactcaactaacagagttgaacctttcttttcacagagcagttttgaaacactctttttgtagaatctgcgaggggatatttggatagatttcagcatttcgttggaaacgggaatatcttcatataaaatctcgacagaagcattctctgaaacttctttgtgatatgtgcattcaagtcacagagttcaatattccctttcacagagtaggtttgaaacactctttttgtagtatctgaagtggacatttggagcgccttgacgcctacggtgaaaagggaaatatcttctcataaaaagtagacagaagcaatctcagaatcttctttgggatatatgcacgcagctaacagagttgaacctttctattgacagagctgttttgaaacactctttctgtggaatctgcaagtggatatttggatagcttggaggatttcgttggaaacgggattacgtataaaaagtagacagcagcatcctcaggaacttctttgtgatgtgtgcattcaagtcacagagttgaacattccctttcgtacagcagttttgaaacactctttctgtagtatctggaagtgaacattaggacagctttcaggtctatggtgagaaaggcaatatcttcaaataaaaactagacagaagaattctcataaacttgttcgtgatgtgtgaactcagctaacacacgtggatctttcttttgatagagcagttctgaaaaacactttttgttgaatctgcaagaggacatttggatagatttgaagatttcgttggaaacgggaatatcttcatatcaaatctagacagaagcattctcggaaacgtctttgtgatgtttgcattcaactcatagatttgaacattccgtttcagagagcagctttgaggcactcattttgtagtatgtgcaagtggatattgggagcgctctgaggccttcggtgaaaaagcaaatatcttcccataaccactagacagaaacattctcagaaactcctttatgacgtatgcactcacctaacagagaagaaccttccttttgacagagcagttttgatacactctttttgtagaatctgcaagtggatattgggatagctgtgaagatttcgttggaaacggtaatatcttcctataaaatctagacagaagcattctcagaaactgctctgtgatgtctgcattcaagtcacagagttgaacattgcctttcatagagcaggtttgaaacactctttttgtagtatatggaagtggacgtttcggacggtttcaggcccatggtgataaagggaatatcttcccctacaagctagaaagaacaattctgtgaaacttgtttgtgatgtgtgtactcaactaacagagttgaacctttctttttacagagcagttttgaaacactctttttgtagaatctgcgaggggatatttggatagatttcaggatttcgttggaaacgggaatatcttcatataaaatctcgacagaagcattctcagaaacttctttgtgatatctgcattcaagtcacagagttgaatattccctttcacagagtaggtttgaaacactctttttgtagtatctggaagtggacatttggagcgccttgacacctacggtgaaaaggtaaatatcttaccataaaaacgagacagaagcaatctcagaatcttctttgggatatatgcacgcagctaacagagttgaacctttctattgaaagagcagtttagaaacagtctttctgtggaatctgcaagtggatatttagatagcttggaggatttcgttggaaacgggattacgtataaaaagtagacagccagcatcctcagaaacttctttgtgatgtgtgcattcaagtcacagtagttgaacattccctttcgtaaagcagttttgaaacactctttctgtagtatctggaagtgaacattaggacagctttcaggtctatggtgagaaaggaaatatcttcaaataaaaactagacagagcattctcataaacttgtttgtgatgtgtgaactcagctaacagagatggatctttcttttgatagagcagatctgaaaaacactttttgttgaatctgcaagtggacatttggatagatttgaagatttcgttggaaacgggaatatcttcatatcaaatctagacagaagcattctcggaaacgtctttgtgatgtttgcattcaactcataaagttgaacattccgtttcagagagcagctttgaggcactctttttgtagtatgtgcaagtggatatttggagcgctctgaggccttctgtgaaaaagcaaatatcttcccataaccactagacagaaacattctcagaaactcctttatgacgtatgcactcacctaacagaaaagaaccttccttttgacagagcagttttgatacactctttttgtagaatctgcaagtggatatttggatagctgtgaagatttcgttggaaacgggaatagcttcctataaaatctagacagaagcattctcagaaactgctctgtgatgtctgcattcaagtcacagagttgaacattgcctttcatagagcaggtttgaaacgctctttttgtagtatatggaagtggatgtttcggacggttggaagcccatggtgataaagggaatatcttcccctacaagctggaaagaagcattctgtgaaacttgtttgtgatgtgtgtactcaactaacaaagttgaacctttcttttcacagagcagttttgaaacactctttttgtagaatctgcgaggggatatttggatacatttcaggatttcgttggaaacgggaatatcttcatataaaatctcgacagaagcattctcagaaacttccttgtgatatgtgcattcaagtcacagagttgaatattccctttcacagagtaggtttgaaacactctttttgtagtatctggaagtggacatttggagcgccttgacgcctacggtgaaaggggaaatatcttcccataaaaactagacagaagcaatctcagaatcttctttgggatatatgcacgcagctaacagagttgaacctttctattgacagagcagttttgaaacagtctttctgtggaatctgcaagtggatatttggatagcttggaggatttcgttggaaacgggattacgtataaaaagtagtcagcagcatcctcagaaacttctttgtgatgtgtgcattcaagtcacagagttgaacattccctttcgtacagcagttttgaaacactctttctgtagtaaccggaagtgaacattaggacagctttcaggtctatggtgagaaaggaaatatcttcaaataaaaactagacagaagcattctcataaacttgtttgtgatgtctgaactcagctaacagaggtggatctttcttttgatagagcagttctgaaaaacactttttgttgaatctgcaagtggacatttggatagaattgaagatttcgttggaaacgggaatatcttcatatcaaatctagacagaagcattctcagaaacgtctttgtgatgtttgcattcaacccatagagttgaacattccgtttcagggagcagctttgaagcactctttttgtagtatgtgcaagtggatatttggagcgctgtgaggcctgcggtgaaaaagcaaatatcttcccataaccactagacagaaacattctcagaaactcctttatgacgtatgcactcaactaacagagaagaaccttccttttgacagagcagttttgatacactctttttgtagaatctgcaagtggatatttggatagctgtgaagatttcgttggaaacgggaatatcttcctataaaatctagacagaagcattctcagaaactgctctgtgatgtctgtattcaagtcacagagttgaacattgcctttcatagagcaggtttgaaacgctctttttgtagtatatgtaagtggatgtttcagacggtttgaggccgatggtgataaagggaatatcttcccctacaagctagaaagaagcattctgtgaaacttgtttttgatgtgtgtactcaactaacagagttgaaccttcctttttacagagcagttttgaaacactctttttgtagaatctgcgaggggatatttggatagatttcaggatttcgctggaaacgggagtatcttcatataaaatctcgacagaagcattctcagaaacttccttgcgatatgtgcattcaagtcacagagttgaatattccctttcacagagtaggtttgaaacactctttttgtagtatctggaagtggacatttggagcgccttgacgcctacggtgaaaagggaaatatcttcccatcaaaactagacagaagcaatctcagaatcttctttgggatatatgcacgcagctaacagagttgtacctttctattgacagagcagttttgaaacagtctttctgtggaatctgcaagtggatatttggatagcttggaggatttcgttggaaacgggattacgtataaaaagtagacagcagcatcctcagaatcttctttgtgatgtgtgcattcaagtcacagagttgaacattccctttcgtacagcagttttgaaacactctttctgtagtatctggaagtgaacattaggacagctttcaggtctatggtgagaaaggaaatatcttcaaataaaaactagacagaagcattctcataaacttgtttgtgatgtctgaactcagctaacagaggtggatcttccttttgatagagcagttctgaaaaacactttttgttgaatctgcaagtggacatttggatagatttgaagatttcgttggaaacgggaatatcttcatatcaaatctagacagaagcattctcagaaacgtctttgtgatgtttgcattcaactcatagaattgaacattgcggttcagagagccgctttgaagcactctttttgtagtatgtgcaagtggatatttggagcgatctgaggcctaaggtgaaaaagcaaatatcttcccataaccactagacagaaacattctcagaaactcctttatgacgtatgtactcaactaacagagaagaaccttccttttgacagagcagttttgatacactctttttgtagaatctgcaagtggatatttggatagctgtgaagatttcgttggaaacggaaatatcttcctataaaatctagacagaagcattctcagaaactgctctgtgatgtctgcattcaagtcacagagttgaacattgcctttcatagagcaggtttgaaacgccctttttgtagtatatggaagtggacgtttcggacggtttgaggcccatggtgataaagggaatatcttcccctacaagctagaaagaagcattgtgtgaaacttatttgtgatgtgtgtactcaactaacagagttgaacctttctttttacagagcagttttgaaacactctttttgtagaatctgcgaggggatatttgggtacatttcaggatttcgttggaaacgggaatatcttcatataaaatctcgacagaagcattctcagaaacttctttgtgatatgtgcattcaagtcacagagttgaatattccctttcacagagtaggtttgaaacactctttttgtagtatctggaagtggacatttggagcgccttgacccctacggtgaaaagggaaatatcttcccacaaaaactagacagaagcaatctcagaatctactttgggatatatgcacgcagctaacagagttgaacctttctattgacagagcagttttgaaacagtctttctgtggaatctgcaagtggatatttggatagcttggaggatttcgttggaaacgggattacgcataaaaagtagacagcagcatcctcagaaacttctttgtgatgtgtgcattcaagtcacagtgttgaacattccctttcgtacagcagttttgaaacactctttctgtagtatctggaagtgaacattaggacagctttcaggtctattgtgagaaaggaaatatcttcaaataaaaactagacagaagcattctcataaacttgtttctgatgtgtgaactcagctaacagaggtggatctttcttttgatagagcagttctgaaaaacactttttgttgaatctgcaagtggacatttggatagatttgaagatttcgttggaaacgggaatatcttcatatcaaatctagacagacaagcattctcagaaacgtctttgcgatgtttgcattcaactcatagagttgaacattccgtttcagagagcagctgtgaggcactctttttgtagtatgtgcaagtggatatttggagcgctctgaggcctatggtgaaaaagcaaatatcttcccataaccactagacagatacattctcagaaactcctttatgacgtatgtactcaactaacagagaagaaccttccttttgacagagcagttttgatacactctttttgtagaaactgcaagtggatatttggatagctgtgaagatttcgttggaaacgggaatatcttcctataaaatctagacagaagcattctcagaaactgctctgtgatgtctgcattcaagtcacagagttgaacattgcctttcatagagcaggtttgaaacgctctttttgtagtatatggaagtggatgtttcggacggttggaggcccatggtgataaagggaatatcttcctctacaagctagaaagaagcattctgtgaaacttgtttgtgatgtgtgcactcaactaacagagttgaacctttctttttacagagcagttttgaaacactctttttgtagaatctgcgaggggatatttggatacatttcaggatttcgttggaaacgggaatatcttcatataaaatctcgacagaagcattctcagaaacttccttgtgatatgtgcattcaagtcacagagttgaatattccctttcatagagtaggtatgaaacactctttttgtagtatctggaagtggacatttggagcgccttgacgcctacggtgaaaagggaaatatcttcccataaaaactagacagaagcaatctcagaatcttctttgggatatatgcacgcagctaacagagttgaacctttctattgacagagcagttttgaaacagtctttctgtgtaatctgcaagtggatatttggatagcttggaggatttcgttggaaacgggattacgtataaaaagtagacagcaacatcctcagaaacttctttgtgatgtgtgcattcaagtcacagagttgaacattccctttcgtacagcagttttgaaacactctttctgtagtaactggaagtgaacattaagacagctttcaggtctatggtgagaaaggaaatatcttcaaataaaaactagacagaagcattctcataaacttgtttgtgatgtgcgaactcagctaacagaggtggatctttcttttgatagagcagttctgaaaaacactttttgttgaatctgcaagtggacatttggatagatttgaagatttcgttggaaacgggaatatcttcatatcaaatctagacagaagcattctcagaaacgtctttgtgatgtttgcattcaactcatagagttgaacattccgtttcagagagcagctttgaagcactctttttgtagcatgtgcaagtggatatttggagcgctctgaggcctacggtgaaaaagcaaatatcttcccataaccagtagacagaaacattctcagaaactcctttatgacgtatgcactcacctaacagagaagaaccttccttttgacagagcagttttgatacactctttttgtagaatctgcaagtggatatttggatagctgtgaaggtttcgttggaaacggaaatatcttcctatgaaatctagacagaagcattctcagaaacagctctgtgatgtctgcattcaagtcacagagttgaacattgcctttcctagagcaggtttgaaatgctctttttgtagcatatggaagtggacgtttcggacggtttgaggcccatggtgataaagggaatatcttcccctacaagctagaaagaagcattctgtgaaactagtttgtgatgtgtgtactcaactaacagagttgaacctttctttttacagagcagttttgaaacactctttttgtagaatctgcgaggggatatttcgatagatttcaggatttcgttggaaacgggaatatcttcatataaaatctcgacagaagcattctcagaaacttctttgtgatatgtgcattcaagtcacagagttgaatattcccttttacagagtaggtttgaaacactctttttgtagtatctggaagtggacatttggagcgccttgacgcctacggtgaaaagggaaatatcttctcataaaaagtagacagaagcaatctcagaatcttctttgggatatatgcacgtagctaacagagttgaacctttctattgacagagcaggtttgaaacagtctttctgtggaatctgcaagtggatatttggatagcttggaggatttcgttggaaacaggattacgtataaaaagtagacagcagcatcctcagaaacttctttgtgatgtgtgcattcaagtcacagagttgaacattcccttttgtacagcagttttgaaacactctttctgtagtatctggaagtgaacattaggacagctttcaggtctatggtgagaaaggaaatatcttcaaataaaaactagacagaagcattctcataaacttgtttgtgatgtgtgaactcagctaacagaggtggatctttcttttgatagagcagttctgaaaaacactttgttgaatctgcaagtggacatttggatagatttgaagatttcgttggaaacgggaatatcttcatatcaaatctagacagaagcattctcggaaacgtctttgtgatgtttgcattcaactcatagagttgaacattccgtttcagagagcagctttgaagcactctttttgtagtatgtgcaagtggatatttggagcgctgtgaggcctacggtgaaaaagcaaatatcttcccataaccactagaaagaaacattctcagaaattcctttatgacgtatgcactcacctaacagagaagaaccttccttttgacagagcagttttgatacactctttttgtagaatctgcaagtggatatttggatacctgtgaagatttcgttggaaacgggaatatcttcctataaaatctagacagaagcattctcagaaactgctctgtgatttctgcattcaagtcacagagttgaacattgcctttcatagagcaggtttgaaacgctctttttgtagtatatggaagtggatgtttcggacggttggaggcccatggtgataaagggaatatcttcccctacaagctagaaagaagcattctgtgaaacttgtttgttatgtgtgtactcaactaacagagttgaacctttcttttcacagagcagttttgaaacactctttttgtagaatctgcgaggggatatttggatagatttcaggatttcgttggaaacgggaatatcttcatataaaatctcgacattagcattctcagaaacttccttgtgatatgtgcattcaagtcacagagttgaatattccctttcacagagtaggtttgaaacactctttttgtagtatctggaagtggacatttggagcgccttgacacctacggtgaatagggaaatatcttcccataaaaactagacagaagcaatctcagaatcttctttgggatatatgcacgcagctaacagagttgaacctttctattgacagagcagttttgaaacagtctttctgtggaatctgcaagtggatacttggagagcttggaggatttcgttggaaacgggattacgtataaaaagaagacagcagcatcctcagaatcttctttgtgatgtgtgcattcaagtcacagatttgaacattccctttcgtacagcagttttgaaacactctttctgtagtatctggaagtgaacattaggacagctttcagctctatggtgagaaaggaaatatcttcaaataaaaactagacagaagcattctcataaacttgtttgtgatgtgtgaactcagctaacagaggtggatctttcttttgatagagcagtactgaaaaacactttttgttgaatctgcaagtggacatttggatagatttgaagatttcgttggaaacgggaatatcttcatatcaaatctagacagaagcattctcagaaacgtctttgtgatgtttgcattcaactcatagagttgaacattccgtttcagagagcagctttgaagcactctttttgtagtatgtgcaagtggacatttggagcgccctgaggcctacggtgaaaaagcaaatatcttcccataaccactagacagaaacattctcagaaactcctttatgacgtatgcactctcctaacagagaagaaccttccttttgactgagcagttttgatacactctttttgcagaatctgcaagtggatatttggatagctgtgaagatttcgttggaaacgggaatatcttcctataaaatctagacagaagcattctcagaaactgctctgtgatgtctgcattcaagtcacagagttgaacattgcctttcctagagcaggtttgaaacgctctttttgtagtatatggaagtggacgtttcggacggcttgaggcccatggtgataaagggaatatcttcccctacaagctagaaagaagcattctgtgaaacttgtttgtgatgtgtgtactcaactaacagagttgaaccttttatttttacagagcagttttgaaacactctttttgtagaatctgcgaggggatatttggatagatttcaggatttcgttggaaaggggaatatcttcatataaaatctcgacagaagcattctcagaaactgctctgtgatgtctgcattcaagtcacagagttgaatattccctttcacagagtaggtttgaaacactctttttgtagtatctggaagtggacatttggagcgccttgacacctatggtgaaaagggaaatatcttcccataaaaactagacagaagcaagctcagaatcctctttaggatatatgcacgcagctaacagagttgaacctttctattgacagagcagttttgaaacagtctttctgtggaatctgcaagtggatatttggatagcttggaggatttcgttggaaacgggattacgtataaaaagtagacagcagcatcctcagaaactactttgtgatgtgtgcattcaagtcacagagttgaacattccctttcgtacagcagttttgaaacactctttctgtagtatctggaagtgaacattaggacagctttcaggtctatggtgagaaaggaaatatcttcaaataaaaactagacagaagcattctcataaacttgtttgtgatgtgtgaactcagctaacacacgtggatctttcttttgatagagcagttctgaaaaacaatttttgttgaatctgcaagtggacatttggatagatttgaagatttcgttggaaacgggaatatcttcatatcaaatctagacagaagcattctcagaaacgtctttgtgatgtttgcattcaactcatagagttgaacattccgtttcaaagagcagctttgaggccctctttttgtagtatgtgcaagtggatatttggagcgctctgaggcctacggtgaaaaagcaaatatcttcccataaccactagacagaaacattctcagaaactgctttatgacgtatgcactcacctaacagagaagaaccttccttttgacagagcagctttgatacactctttttgtagaatctgcaagtgtatatttggatagctgtgaagatttcgttggaaacgggaatatcttcctataaaatctagacagaagcattctcagaaactgctctgtgatgtctgcattcaagtcacagagttgaacattgcctttcatagagcaggtttgaaatgatctttttgtagtatatggaagtggacgtttcagacggtttgaggcccatggtgataaagggaatatcttcccctacaagctagaaagaagcattctgtgaaacttgtttgtgatgtgtgtactcaagtaagagagttgaacctttcttttcacagagcagttttgaaacactctttttgtagaatctgcgaggggatatttggatagatttcaggatttcgttggaaacgggaatatcttcatataaaatctcgacagatgcattctcagaaacttctttgtgatatgtgcattctagtcacagagttgaatattccctttcatagagtaggtttgaaacactctttttgtactatctggaagtggacatttggagcgccttgacgcctacggtgaagagggaaatatcttcccataaaaactagacagaagcaatctcagaatcttctttgggatatatgcacgaagctaacagagttgaacctttctattgacagagcagttttgaaacagtctttctgtggaatctgcaagtggatatttggatagcttggaggatttcgttggaaacgggattacgtataaaaagtagacagcagcatcctcagaaacttctttgtgatgtgtgcattcaagtcacagagttgaacattccctttcatacagcagtgttgaaacactctttatgtagtatctggaagtgaacattaggacagctttcaggtctatggtgagaaaggaaatatcttcaaataaaaactagacagaagcattctcataaacttgtttgtgatgtgtgaactcagctaacagaggtggatctttcttttgaaagagcagttctgaaaaacactttttgttgaatctgcaagtggacatttggatagatttgaagatttcgttggtaacgggaacatcttcatatcaaatctagacagaagcattctcagaaacgtctttgtgatgtttgcattcaactcatagagttgaacattccgtttcagtagagcagctttgaagcactctttttgtagtatgtgcaagtggatatttggagcgctctgaggcctacggtgaaaaagcaaatatcttcccataaccactagacagaaacattctcagaaactactttatggcgtatgtactcaactagcagagaagaactttccttttgacagagcacttttgatacactctttttgtagtatctgcaagtggatatttggatagctgtgaagatttcgttggaatcgggaatatcttcctataaagtctggacagaagcattctcagaaactgctctgtgatgtctgcattcaagtcacagagttgaacattgcctttcatagagcaggtttcaagcactctttttttagtatatggaagtggacgtttcggacggtttgaggcccatggtgataaaggaaatatcttcccctacaagctagaaagaagcattctgtgaaacttgtttgtgatgtgtgtactcaactaacagagttgaacctttctttttacagagtagttttgaaacactctttttgtagaatctgcgaggggatatttggatacatttcagcatttcgttggaaacgggaatatcttcatataaaatctcgacagaagcattctcagaaacttccttgtgatacgtgcattcaagtcacagagttgaatattccctttcacagagtaggtttgaaacactctttttgtagtatctggaagtggacatttggagcgccttgacacctacggtgaaaagggaaatatcttcccataaaaactagacagaagcaatctcagaatcttctttgggatatatgcacgcagctaacagagttgaacctttctattgacagagcagttttgaaacagtctttctgtggaatctgcaagtgcatattttgatagcttggaggatttcgttggaaacgggattacgtataaaaagtagacagcagcatcctcagaaacttctttgtgatgtgtgcattcaagtcacagagttgaacattccctttcgtacagcagttttgaaacactctttctgtggtatctggaagtgaacattaggacagctttcagctctatggtgagaaaggaaatatcttcaaataaaaactagacagaagcattctcataaacttgtttgtgatgtgtgaactcagctaagagacgtggatctttcttttgatacagcagttttgaaaaacactttttgttgaatctgcaagtggacattttatagatatgaagatttcgttggaaacgggaatatcttcatatcaaatctagacagaagcattctcggaaacgtctttgtgatgtttgcattcaactcatagagttgaacattccgtttcagagagcagctttgaggcactcattttgtagtatgtgcaagtggatatttggagcgctctgaggccttcggtgaaaaagcaaatatcttcccataaccactacacagaaacattctcagaaactcctttatgacgtatgcactcacctaacagagaagaaccttccttttgacagagcatttttgatacactctttttgtagaatctgcaagtggatatttggatagctgtgaagatttcgttggaaacgggaatatcttcctataaaatctagacagaagcattctcagaaactgctctgtgatgtctgcattcaagtcacagagttcaacattgtctttcatagagcaggtttgaaatgctctttttgtagtatatggaagtggacgtttcggacggtttgaggcccatggtgataaagggaatatcttcccctacaagctagaaagaagcattctgtgaaacttgtttgtgatgtgtgtactcaactaacagagttgaacctttctttttacagagcagttttgaaacactctttttgtagaatctgcgaggggatatttggatacatttcaggatttagttggaaacgggaatatcttcacataaaatcttgacagaagcattctcagaagcttctttgtgatatgtgcattcaagtcacagagttcaatattccctttcacagagtaggtttgaaacactctttttgtagtatctggaagtggacatttggagcgccttgacgcctaaggtgaaaagggaaatatcttctcataaaaagtagacagaagcaatctcagaatcttctttgggatatatgcacgcagctaacagagttgaacctttctattgacagagcagttttgaaacagtctttctgtggaatctgcaagtggatatttggatagcttggaggatttcgttggaaacgggattacgtataaaaaagtagacagcagcatcctcagaaacttctttgtgatgtgtgcattcaagtcacagagttgaacattccctttcgtacagcagttttgaaacactctgtagtaactggaagtgaacattaggacagctttcaggtctatggtgagaaaggaaatatcttcaaataaaaactagacagaagcattctcataaacttgtttgtgatgtgtgaactcagcaaacagcggtggatctttcttttgatagagcagttctgaaaaacactttttgttgaatctgcaagtggacatttggatagttttgaagatttccttggaaacgggaatatcttcatatcaaatctagacagaagcattctcagaaacgtctttgtgatgtttgcattcaagtcatagagttgaacattccgtttcagagagcagctttgaagcactctttttgtagtatgtgcaagtggatatttggagcgctctgagacctacggtgaaaaagcaaatatcttcccataaccactagacagaaacattctcagaaactcctttatgacgtgtgcactcacctaacagagaagaaccttccttttgacagagcagttttgatacactctttttgtagaatctgcaagtggatatttggatagctgtgaagatttcgttggaaacgggaatatcttcctataaaacctagacagaagcattctcagaaactgctctgtgatgtctgcattcaagtcacagagttgaacattgcttttcctagagcaggtttgaaacgctctttttgtagtatatggaagtggacgtttcggatggtttgaggcccatggtgataaagggaatatcttcccctacaagctagaaagaagcattctgtgaaacttgtttgtgatgtgtgtactcaactaagagagttgaacctttcttttcacagagcagttttgaaacactctttttgtagaatctgcgaggggatatttggatagatttcagaatttcgttggaaacgggaatatcttcatacaaaatctcgacagaagcattctcagaaacttccttgtgatatgtgcattcaagtcacagagttgaatattccctttcacagagtaggtttgaaacactctttttgtagtatctggaagtggacattcggagcgccttgatgcctacggtgaaaagggaaatatcttcccataaaaactagacagaagcaatctcagaatcttctttgggatatatgcacgcagctaatagagttgaacctttctattgacagagcagttttgaaacagtctttctgtggaatctgcaagtggatatttggatagcttcgaggatttctttggaaacgcgattacgtataaaaagtagacagcagcatcctcagaaacttctttgtgatgtgtgctttcaagtcacagtgttgaacattccctttcgtacagtagttttgaaacactctttctgtagtatctggaagtgaacattaggacagctttcaggtctatggtgagaaaggaaatatcttcaaataaaaactagacagaagcattttcataaacttgtttgtgatgtgtgaactcagctaacagaggtggatctttcttttgatagagcagttctgaaaaacacttattgttgaatctgcaagtggacatttggatagatttgaagatttcgttggaaacgggaatatcttcatatcaaatctagacagaagcattcccagaaacgtctttgtgatgtttgcattcaactcatagagttgaacattccgtttcagagagcagctttgaagcactctttttgtagtatgtgcaagtggatatttggagcgctctgaggcctaaggtgaaaaagcaaatatcttcccataaccactagacagaaacattctcagaaactcctttatgacgtatgcactcacctaacagagaagaaccttccttttgacagagcagttttgatacactctttttgtagaatctgcaagtggatatttggatagctgtgaagatttcgttggaaacgggaatatcttcctataaaatccagacagaagcattctcagaaactgctctgtgatgtctgcattcaagtcacagagttgaacattgcctttcatagagccggtttgaaacgctctttttgtagtatatggaagtggatgtttcggacggttggaggcccatggtgataaagggaatatcttacccaacaagctagaaagaagcattctgtgaaacttgtttgtgatgtgtgtactcaactaacacagttgaacctttctttttacagagcagttttgaaacactctttttgtagaatctgcaagtggatatttggatagctgtgaaggtttcattggaaacgggaatatcttcctataaaatctagacagaagcattctcagaaacttctttgtgatatgtgcattcaagtcacagagttgaatattccctttcacagagtaggtttgaaacactctttttgtagtatctggaagtggacatttgaagcgccttgacgcctacggtgaaaagggaaatatcttcccataaaaactagacagaaagcaatctcagaatcttctttgggatatatgcacggagttaacagagttgaacctttctattgacagagcagttttgaaacagtctttctgtggaatctgcaagtggatatttggatagcttggaggttttctttggaaacgggattacgtataaaaagtagactgcagcatcctcagaaacttctttgtgatgtgtgcattcaagtcacagagttgaacattccctttcgtacagcagttttgaaacactctttctgtagtatctggaagtgaacattaggacagctttcaggtctatggtgagaaaggaaatatcttcaaatataaactagacagaagcattttcataaacttgtttgtgatgtgtgaactcagctaacagaggtggatctctcttttgatagagcatcagctaacagacgtggatctttcttttgatacagcagttttgaaaaacactttttgttgaatctgcaagtggacatttggatagatatgaagatttcgttggaaacgggaatatcttcatatcaaatctagacagaagcattctcagaaacgtctttgtgatgtttgcattcaactcatagagttgaacattccgtttcagagagcagctttgaagcactctttttgtagtatgtgcaagtggatatttggagcgctctgagtcctacggggaaaaagcaaatatcttcccataaccactagacagaaacattctcagaaactcctttatgacgtatgtactcaactaacagagaagaaccttccttttgacagagcagtttgaatacactctttttgtagaatctgcaagtggatatttggatagctgtgaagatttcgttggaaacgggaatatcttcctataaaatctagacagaagcattctcaggaactgctctgcgatgtctgtattcaagtcacagagttgaacattgcctttcatagagcaggtttgaaaccctctttttgtagtatatggaagtggacgtttcggacggtttgaggcccatggtgataaagggaatatcttcccctacaagctagaaagaagcattctgtgaaacttgtttgtgatgtgtgtactcaactaacagagttgaacctttctttttacagagcagttttgaaacactctttttgtggaatctgcgaggggatatttggatagatttcaggatttcgttggaaacgggaatatcttcatagaaaatctcgacagaagcattctcagaaacttctttgtgatatgtgcattcaagtcacagagttgaatattccctttcacagagtaggtttgaaacactctttttgtagtatctggaagtggacatttggagcgccttgacacctacggtgaaaagggaaatatcttctcataaaaagtagacagaagcaatctcagaatcttctttgggatatatgcacgcagctaacagagttgaacctttctattgacagagcagttttgaaacagtctttctgtggaatctgcaagtggatatttggatagcttggaggatttcgttggaaacgggattgcatataaaaagtagacagccagcatcctcagaacttctttgtgatgtgtgcattcaagtcacagagttgaacattccctttcgtacagcagttttgaaacactctttctgtagtatctggaagtgaacattaggacagctttcaggtctatggtgagaaaggaaatatcttcaaataaaaactagacagagcattctcataaacttgttcgtgatgtgtgaactcagctaacacacgtggatctttcttttgatagagcagttctgacaaacactttttgttgaatctgcaagaggacatttggatagatttgaagatttcgttggaaacgggaatatcttcatatcaaatctagacagaagcattgtcagagacgtctttgtgatgtttgcattcaactcatagagttgaacattccctttcagagagcagctttgaagcactctttttgtagcatgtgcaagtggacatttggagcaccctgaggcctacggtgaaaaagcaaatatcttcccataaccactagacagaaacattctcagaaactcctttatgacgtatgcactcacctaacagagaagaaccttccttttgacagagcagttttgatacactctttttgtagaatctgcaagtggatatttggatagctgtgaagatttcgttggaaacgggaatatcttcctataatatctagacagaaagcattctcagaaactgctctgtgatgtctgcattcaagtcacagagttgaacattgcctttcatagagcaggtttgaaacgctctttttgtagtatatggaagtggacgtttcggacggtttgaggcccatggtgataaagggaatatcttcccctacaagctagaaagaagcattctgtgaaacttgtttgtgatgtgtgtacgcaactaacagagttgaacctttctttttacagagcagttttgaaacactctttttgtagaatctgcgaggggatatttggatagatttcaggttttcgttggaaacgggaatatcttcatataaaatctcgacagaagcattctcagaaacttctttgtgatatctgcattccagtcacagagttgaatattctctttcacagagtaggtttgaaacactctttttatagtatctggaattggacatttggagcgccttgacgcctacggtgaaaagggaaatatcttcccataaaaactagacagaagcaatctcagaatcttctttgggatatatgcacgcagctaacagagttgaacctttctattgacacagcagtttagaaacagtctttctgtggaatctgcaagtggatatttggatagcttggaggatttcgttggaaacgggattacgtataaaaagtagacagcagcatcctcagaaacttctttgtgatgtgtgcattcaagtcacagtgttgaacattccctttcgtacagcagttttgaaacactctatctgtagtatctggaagtgaacattaggacagctttcaggtctatggtgagaaaggaaatatcttcaaataaaaactagacagaagcattctcataaacttgtttgtgatgtgtgaactcagctaacagaggtggatctttcttttgatagagcagttctgaaaaacactttttgttgaatctgcaagtggacatttggatagatttgaagatttcgttggaaacggaaatatcttcatatcaaatctagacagaagcattctcagaaacgttctttgtgatgttggcattcaactcatagagttgaacattccgtttcagagagcagctttgaggcactctttttgtagtatgtgcaagtggatatttggagcgctctgaggcctacggtgaaaaagcaaatatcttcccataaccactagacagaaacattctcagaaacttctttatgacgtatgcactcacctaacagagaagaaccttccttttgacagagcagttttgatacactctttttgtagtatctgcaggtggatatttggatagctgtgaagatttcgttggaaacgggaatatcttcctataaagtctggacagaagcattctctgaaactgctctgtgatgtctgcattcaagtcacagagttgaacgttgcctttcatagagcaggtttcaaaccctctttttttagtatatggaagtggacgtttcagactgtttgaggaccatggtgataaaggaaatatcttcccctacaagctagaaagaagcattctgtgaaacttgtttgtgatgtgtgtactcaacttacagagttgaacctttctttttacagagcagttttgaaacactctttttgtagaatctgcgaggggttatttggatagatttcaggatttcgttggaaacgggaatatcttcatataaaatctcgacagaagcattctcagaaacttctttgtgatatgtgcattcaagtcacagagttgaatattccctttcacagagtaggtttgaaacactctttttgtagtatctggaagtggacattttgagcgccttgacgcctacggtgaaaagggaaatatcttctcataaaaagtagacagaagcaatctcagaatcttctttgggatatatgcacgcagctaacagagttgaacctttctattgagagagcagttttgaaacagtctttctgtggaatctgcaagtggatatttggatagcttggaggatttcgttggaaacgggattacgtataaaaagtagacagcagcatcctcagaaacttccttgtggtgtgtgcattcaagtcacagagttgaacattccctttcttacagcagttttgaaacactctttctgtagtatctggaagtgaacattaggacagctttcaggtctatggtgagaaaggaaatatcttcaaataaaaactagacagaagcattctcataaacttgtttgtgatgtgtgaactcagctaacagaggtggatctttcttttgatagagcagttctgaaaaacactttttgttgaatctgcaagtggacatttggatagatttgaagatttcgttggaaacgggaatatcttcataacaattctagacagaagcattctcagaaacgtctttgtgatgtttgcattcaactcatagagttgaacattccgtttcagagagcagctttgaatcactctttttgtagtatgtgcaagtgtatatttggagcgctctgaggcctaaggtgaaaaagcaaatatcttcccataaccactagacagaaacattctcagaaactcctttatgacgtatgcactcacctaacagagaagaaaccttccttttgacagagcacttttgatacactctttttgtagaatctgaaagtggatatttggatagctgtgaagatttcgttggaaacgggaatatcttcctataaattctagacagaagcattctcagaaactgctctgtgatgtctgcgttcaagtcacagagttgaacattgcctttcatggagcaggtttgaaacgctctttttgtagtatatggaaatggacgtttcggacggtttgaggcccatggtgataaagggaatatcttcccctacaagctagaaagaagcattctgtgaaacttgtttgtgatgtgtgtactcaactaacagagttgaacctttctttttacagagcagttttgaaactctctttttgtagaatctacgaggggatatttggatagatttcaggatttcgttggaaacgggaatatcttcatataaaatctcgacagatgcattctcagaaacttctttgtgatatgtgcatactagtcacagagttgaatattccctttcacagagtaggtttgaaacactctttttgtagtatctggaagtggacatttggagcgccttaacgcctacggtgaaaagggaaatatcttcccataaaaactagacagaagcaatctcagaatcgtctttgggatatatgcacgcagctaacagagttgaacctttctattgacatagtagttttgaaacagtctttctgtggaatctgcaagtggatatttggatagcttggaggatttcgttggaaacgggattacgtataaaaagtagacagcagcatcctcagaaacatccttgtgatgtgtgcattcaagtcacagagttgaacattccctttcgtacagcagttttgaaacactctttctgtagtatctggaagtgaactttaggagagctttcaggtctatagtgagaaaggatatatacttcaaataaaaactagacagaagcattttcataaacttgtttgtgatgtgtgaactcagctaacagaggtggatctttcttttgatagagcagttctgaaaaacactttttgttgaatctgcaagtggacatttggatagatttgaagatttcgttgggaacgggaatatcttcatatcaaatctagacagaagcattgtcagaaacgtctttgtgatgtttgcattcaactcatagagttgaacattccgtttcagagagcagctttgaagcactctttttgtagtatgtgcaagtggatatttggagcgctctgaggcctaaggtgaaaaagcaaatatcttcccataaccactagacagaaacattctcagaaactcctttatgacgtatgcactcacctaacagagaagaaccttccttttgacagagcagttttgatacactctttttgtagaatctgcaagtggatatttggatagctgtgaagatttcgtgggaatcgggaatatcttcctataatatctagacagaagcattctcagaaactgctctttgatgtctgcattcaagtcacagagttgaacattgcctttcatagagcaggtttgaaacactctttttgtagtatatggaagtggacgtttcggacggtttgaggcccatggtgataaagggaatatcttcccctacaagctagaaagaagcattctgtgaaacttgtttgtgatgtgtgtactcaactaacagagttgaacctttctttttacagagcagttttgaaacagtctttttgtagaatctgcgaggggatatttggatagatttcaggatttcgttggaaacgggaatatcttcatataaaatctcgacagaagcattctcagaagcttctttgtgatatgtgcattcaagtcacagagttcaatattccctttcacagagtaggtttgaaacactctttttgtagtatctggaagtggacatttggagcgccttgacgcctacggtgaaaagggaaatatcttctcataaaaagtagacagcagcaatctcagaatcttctttgggatatatgcacggagttaacagagttgaacctttctattgacagagcagttttgaaacagtctttctgtggaatctgcaagtggatatttggatagcttggaggttttctttggaaacgggattacgtataaaaagtagactgcagcatcctcagcaaacttctttgtgatgtgtgcattcaagtcacagagttgaacattccctttcgtacagcagttttgaaacactctttctgtagtatctggaagtgaacattaggacagctttcaggtctatggtgagaaaggaaatatcttcaaataaaaactagacggaagcattctcataaacttgtttgtgatgtgtgaactcagctaacagaggatggatctttcttttgatagagcagttctgaaaaacactttttgttgaatctgcaagtggacatttggatagatttgaagatttcgttggaaacgggaatatcttcatatcaaatctaggcaagaagcattctcggaaacgtctttgtgatgtttgcattcaactcatagagttgaacattccgtttcagagagcagctttgaggcactcattttgtagtatgtgcaagtggatatttggagcgctctgaggccttcggtgaaaaagcaaatatcttcccataaccactagacggaaacattctcagaaactcctttatgacgtatgtactcaactaacagagaagaaccttccttttgacagagcagatttgatacactctttttgtagaatctgcaagcggatatttggatagctgtgaagatctcgttggaaacgggaatatcttcctataaaatctagacagaagcattctcagaaactgctctgtgatgtctgcattcaagtcacagagttgaacattgcctttcctagagcaggtttgaaacgctctctttgtagtatatggaagtggacgtttcggacggtttgaggcccatggtgataaagggaatatcttcccctacaagctagaaagaagcattctgtgaaacttgtttgtgatgtgtgtactcaactaacagagttgaacctttcttttcacagagcagttttgaaacactctttttgtagaatctgcgaggggatatttggatacatttcagcatttcgttggaaacgggaatatcttcatataaaatctcgacagaagcattctcagaaacttctttgtgatatgtgcattgaagtcacagagttgaatattccctttcacagagtaggtttgaaacactctttttgtagtatctggaagtggacatttggagcgccttgacacctacggtgaaaagggaaatatcttcccataaaaactagacagaagcaatctcagaattttctttgggatatatgcacacagctaacagagttgaacttttctattgacatagcagttttgaaacagtctttctgtggaatatgcaagtggatatttggatagcttggaggatttcgttggaaacgggattacgtataaaaagtagacagcagcatcctcagaaacttctttgtgatgtgtgcattcaagtcacagagttgaatattccctttcgtacagcagttttgaaacactctttctgtagcatctggaagtgaacattaggacagctttcaggtctatggtgagaatggaaatatcttcaaataaaaactagacagaagaatactgataaacttgtttgtgaagtgtgaactcagctaacacaggtggatctttcttttgatacagcagttttgaaaaacattttgttgaatctgcaagtggacatttggatagatttgaagatttcgttggaaacgggaatatcttcatatcaaatctagacagaagcattctcagaaacgtctttgtgatgcttgcattcaactcatagagttgaacattcccttccagagagcagctttgaagcactctttttatagtatgtgcaaggggatatttggagcgctctgaggcctaaggtgaaaaagcaaatatcttcccataaccactagacagaaacattctcagaaactcctttatgacgtatgcactcacctatcagagaagaaccttccttttgacagagcagttttgatacactctttttgtagaatctgcaagtggatatttggatatctgtgaagatttcgttggaaacgggaatatcttcctataaaatctagacagaagcattctcagaaactgctctgtgatgtctgcattcaagtcacagagttgaatattgcttttcatagagcaggtttgaaacgctctttttgtagtatatggaagtagacgtttcggacggtttgaggcccatggtgataaagggaatatcttcccctacaagctagaaagaagcattctgtgaaacttgtttgtgatgtgtgtactcaactaacagagttgaacctttctttttacagagcagttttgaaacactctttttgtagaatctgcgaggggatatttggataggtttcaggatttcgttggaaacgggaatatcttcatataaaatctcgacagaagcattctcagaaacttctttgtgatatgtgcattcaagtcacagagttgaatattccctttcacagtgtaggtttgaaacactctttttgtagtatctggaagtggacatttggagcgccttgacgcctacggtgaaaagggaaatatcttcccataaaaactagacagaagcaatctcagaattttctttgggatatatgcacacagctaacagagttgaacttttctattgacatagcagttttgaaacagtctttctgtggaatctgcaagtggatatttggatagcttggaggatttcgttggaaacaggattacgtataaaaagtagacagcagcatcctcagaaacttctttgtgatgtgtgcattcaagtcacagagttgaacattccctttcgtacagcagttttgaaacactctttctgtagtatctggaagtgaacattaggacagctttcaggtctatggtgagaaacgaaatatcttcaaataaaaactagacagaagcattctcataaacttgtttgtgatgtgtgaactcagctaacagaggtggatctttcttttgatagagcagttctgaaaaacacttttgttgaatatgcaagtggacatttggatagatttgaagatttcgttggaaacgggaatatcttcatatcaaatctagacagaagcattctcggaaacgtctttgtgatgtttgcattcaactcatagagttgaacattccgtttcagagagcagctttgaagcactctttttgtagtatgtgcaagtggatatttggagcgctctgaggcctacggtgaaaaagcaaatatcttcccataaccactacacagaaacattctcagaaactccttttatgacgtatgcactcacctaacagagaagaaccttccttttgacagagcagttttgatacactctttttgtagaatctgcaagtggatatttggatagctgtgaagatttcgttggaaacgggaatatcttcctataaaatctatacagaagcattctcagaaactgctctgtgatgtctgcattcaagtcacagagttgaacattgcctttcatagagcaggtttgaaacgctctttttgtagtatatggaagtggacgtttcggacggtttgaagcccatggtgataaagggaatatcttcccctacaagctagaaagaagcattctgtgaaacttgtttgtgatgtgtgtactcaactaacagagttgaacctttctttttacagagcagtgttgaaacactctttttgtagaatctgcgaggggatatttggatagatttcaggatttcgttggaaacgggaatatcttcatataaaatctcgacagaagcattctcagaagcttctttgtgatatgtgcattcaagtcacagagttcaatattccctttcacagagtaggtttgaaacactctttttgtagtatctggaagtggacatttggagcaccttgacgcctacggtgaaaagggaaatatcttctcataaaaagtagacagaagcaatctcagaatcttctttgggatatttgcacgcagctaacagagttgaacctttctattgacagagcagttttgaaacagtctttctgtggaatctgcaagtggatatttggatagcttggaggatttcgttggaaacgggattacgcataaaaagtagacagcagcatcctcagaaacttctttgtgatgtgtgcattcaagtcacagagttgaacattccctttcgtacagcagttttgaaactctctttctgtagtatctggaagtgaacattaggacagctttcacgtctatggtgagaaaggaaatatcttcaaataaaaactagacagaagcattctcataaacttgtttgtgatgtgtgaactcagctaacagaggtggatctttcttttgatagagcagttttgaaaaacactttttgttgaatctgcaagtggacatttggatagatttgaagatttcgttggaaacgggaatatcttcatatcaaatctagacagaagcattctcagaaacgtctttgtgatgtttgcattcaactcatagagttgaacattccgtttcagagagcagctttgaagcactctttttgtagtatgtgcaagtggatatttggagcgctctgaggcctacggtgaaaaagcaagtatcttcccataaccactagacagaaacattctcagaaactcctttatgacgtatgcactcacctaacagagaagaaccttccttttgacagagcagttttgatacactctttttgtagaatctgcaagtggatatttggatagctgtgaagatttcgttggaaacgggaatatcctcctataaaatctagacagaagcattctcagaaactgctctgtgatgtctgcattcaaatcacagagttgaacattgcctttcctagagcaggtttgaaacgctctttttgtagtatatggaagtggacgtttcggacggtttgaggcccatggtgataaagggaatatcttcccctagcagctagaaagaagcattctgaggaaacttgtttgtgatgtgtgtactcaactaacagagttgaacctttctttttgcagagcagttttgaaacactctttttgtagaatctgcgaggggatatttggatagatttcaggatttcgttggaaacgggaatatcttcatataaaatctcgacagaagcattctcagaaacttccttgtgatatgtgcattcaagtcacagagttgaatattccctttcacagagtaggtttgaaacactctttttgtagtatctggaagtggacatttggagcgccttgacgcccacggtgaaaagggaaatatcttccaataaaaactagacagaagcaatctcagaatcttctttgggatatatgcacgcagctaacagagttgaacctttctattgacagagcagttttgaaacagtctttctgtggaatctgcaagtggatatttggatagcttggaggacttcgttggaaacgggattaagtataaaaagtagacagcagcatcctcagaaacttctttgtgatgtgtgcattcaagtcacagagttgaacattctctttcgtacagcagttttgaaatgctctttctgtagtatctggaagtgaacattaggacagctttcaggtctatggtgagaaaggaaatatcttcaaataaaaactagacagaaagcattctcataaacttgtttgtgatgtgtgaactcagctaacagaggtggatctttcttttgatagagcagttctgaaaaacactttttgttgaaactgcaagtggacatttggatagatttgaagatttcgttggaaacgggaatatcttcatatcaaatctagacagaagcattctcagaaacgtctttgtgatgtttgcattcaactcatagagttgaacattccgtttcagagagcagctttgaagcactctttttgtagtatgtgcaagtggatatttggagcgctctgaggcctacggtgaaaaagcaaatatcttcccataaccagtagacagaaacattctcagaaactcctttatgacgtatgcactcacctaacagagaagaaccttccttttgacagagcacttttgatacactctttttgtagaatctgcaagtggatatttagatagctgtgaagatttcgttggaaacgggaatatcttcctataaaatctagacagaagcattctcagaaactgctctgtgatgtctgcattcaattcacagagttgaacattgcctttcctagagcaggtttgaaatgctctttttgtagtatatggaagtggacgtttcggacggtttgaggcccatggtgataaagggaatatcttcccctacaagctagaaagaagcattctgtgaaacttgtttgtgatgtgtgtactcaactaacagagttgaacctttctttttacagagcagttttgaaacactctttttgtagaatctgcgatgggttatttggatacatttcagcatttcgttggaaacgggaatatcttcatataaaatctcgacagaagcattctcagaaacttctttgtgatatgtgcattcaagtcacagagttgaatattccctttcacagagtaggtttgaaacactctttttgtagtatctggaagtggacatttggagcgccttgacgcctacagtgaaaagggaaatatcttcccataaaaactagacagaagcaatctcagaattttctttgggatatatgcacacagctaacagtagttgaacttttctattgacatagcagttttgaaacagtctttctgtggaatctgcaagtggatatttggatagcttggaggatttcgttggaaacgggattacgtataaaaattagacagcagcatcctcagaaacttctttgtgatgtgtgcattcaagtcacagagttgaacattccctttcgtacagcagttttgaaacactctttctgtagtaactggaagtgaacattaggacagctttcaggtctatggtgagaaaggaaatatcttcaaataaaaactagacggaagcattctcataaacttgtttgtgatgtgtgaactcaactaacacacgtggatctttcttttgatagagcagttctgaaaaacactttttgttgaatctgcaagtggacatttggatagatttgaagatttcgttggaaacgggaatatcttcatatcaaatctagacagaagcattctcagaaacgtctttgtgatgtttgcattcaactcatagagttgaacattccctttcagagagcagctttgaagcactctttttgtagcatgtgcaagtggacatttggagcgccctgaggcctacggggaaaaagcaaatatcttcccataaccactagacaggaaacattctgagaaactcctctatgacgtatgcactcacctaacagagaagaaccttccttttgacagagcatttttgatacactctttttgtagaatctgcaagtggatatttggatagctgtgaagatttcgttggaaacgggaatatcttcctataaaatctagacagaagcattctcagaaactgctctgtgatgtctccgttcaagtcacagagttgaacattgcctttcatggagcaggtttgaaacgctctttttgtagtatatggaaatggacgtttcggacggtttgaggcccatggtgataaagggaatatcttcccctacaagctagaaagaagcattctgtgaaacttgtttgtgatgtgtgtactcaactaacagagttgaacctttctttttacagagcagttttgaaactctctttttgtagaatctgcgaggggatatttggatagatttcaggatttcgatggaaacgggaatatcttcatataaaatctcgacagaagcattctcagaaacttctttgtgatatgtgtattcaagtcacagggttgaatactccctttcacagagtaggtttgaaacactctttttgtagtatctggaagtggacatttggagcgccttgacgcctacggtgaaaagggaaatatcttcccataaaaactagacagaagcaatctcagaatcttctttgggatatatgcacgcagctaacagagttgaacctttctattgacagagcagttttgaaacagtctttctgtggaatctgcaagtggatatttggatagcttggaggatttcgttggaaacgggattacgtacaaaaagtagacagcagcatcctcagaaacttctttgtgatgtgtgcattcaagccacagagttgaacattccctttcgtacagcagttttgaaacactctttctgtagtatctggaagtgaacattaggacagctttcaggtctatggtgagaaaggaaatatcttcaaataaaaactagacagaagcattctcataaacttgtttgtgatgtgtgaactcagctaacagaggtggatctttcttttgatagagcagttctgaaaaacactttttgttgaatctgcaagtggacatttggatagatttgaagatttcgttggaaacgggaatatcttcataacaaatctagacagaagcattctcagaaacgtctttgtgatgtttgcattcaactcatagagttgaacattccgtttcagagagcagctttgaagcactctttttgtagtatgtgcaagtggatatttggagcgctctgaggcctacggtgagaaagcaaatatcttcccataaccactagacggaaacattctcagaaactcctttatgacgtatgcactcacctaacagagaagaaccttccttttgacagagcagttttgatacactctttttgtagaatctgcaagtggatatttggatagctgtgaagattttgctggaaacgggaatatcttcctataaaatctagacagaagcattctcagaaactgctctgtgatgtctgcattcaagtcacagagttgaacattgcctttcatagagcaggtttgaaacgctctttttgtagtatatggaagtggacgtttcggatggtttgaggcccatggtgataaagggaatatcttcccctacaagctagaaagaagcattctgtgaaacttgtttgtgatgtgtgtactcaactaacagagttggacctttctttttacagagcagttttgaaacactctttttgtagaatctgtgaggggatatttggataggtttcaggatttcgttggaaacgagaatatcttcatataaaatctcgacagaagcattctcaggaaacttctttgtgatatctgccttcaagtcacagagttgaatattccctttcacagagtaggtttgaaacactctttttgtagtatctggaagtggacatttggaacgccttggcgcctacggtgaaaaggtaaatatcttcccataaaaactagacagaaagcaatctcagaatcttctttgggatatatgcacgcagctaacagagttgaacctttctattgactgagcagatttgaaacagtctttctgtggaatctgcaagtggatatttggatagcttggaggatttcgttggaaacgggattacgtataaaaagtagacagcagcatcctcagaaacttctttgtgatgtgtgcattcaagtcacagagttgaacattccatttcgtacagcagttttgaaacactctttctgtagtatctggaagtgaacattaggacagctttcaggtctatggtgagaaaggaaatatcttcaaataaaaactagacagaagcattctgataaacttgtttgtgaagtgtgaactcagctaacaggtggatctttctttcgaaacagcagttttgaaaaacactttttgttgaatctgcaagtggacatttgaatagatttgaagatttcgttggaaacaggaatatctttatatgaaatctagacagaagcattctcagaaacgtctttgtgatgtttgcattcaactcatagagttgaagattccctttcagagagcagctttgaagcactctttttgtagtatgtgcaaggggatatttggagcgctctgaggcctaaggtgaaaaagcaaatatcttcccataaccactagacagaaacattctcagaaactcctttatgacgtatgtactcaactaacagagaagaaccttccttttgaaagagcagttttgatacactctttttgtacaatctgcaagtggatatttggatagctgtgaagatttcgatggaaacgggaatatcttcctataaaatctagacagaagcattctcagaaactgctctgtgatgtctgcattcaagtcacagagttgaacattgcttttcctagagcaggtttgaaacgctctttttgtagtatatggaagtggacgtttcggacggtttgaggcccatggtgttaaagggaatatctttccctacaagctagaaagaagcattctgtgaaacttgtttgtgatgtgtgtactcaactaacagagttgaacctttccttttacagagcagttttgaaacactctttttgtagaatctgcgaggggatatttggatagatttcaggatttcgttggaaacgggaatatcttcatataaaatctcgacagaagcattctcagaaacttctttgtgatatctgcattcaagtcacagagttgaatattccctttcacagagtaggtttgaaacactctttttgtagtatctggaagtggatatttggagcgccttgacacctacggtgaaaagggaaatatcttcccataaaaactagacagaagcaatctcagaatcttctttgggatatatgcacgcagctaatagagttgaacctttctattgacagagcagttttgaaacagtctttctgtggaatctgcaagtggatatttggatagcttcgaggatttctttggaaacgggattacgtataaaaagtagacagcagcatcctcagaaacttctttgtgatgtgtgcattcaagtcacagagatgaacattccctttcgtacagcagttttgaaacactctttctgtagtatctggaagtgaacattaggacagctttcaggtctatggtgagaaaggaaatatcttcaaataaaaactagacagaagcattctcataaacttgtttgtgatgtgtgaactcagctaacagaggtggatctttcttttgatagagcagttctgaaaaacactttttgttgaatctgcaagtggacatttggatagatttgaaggtttcgttggaaacgggaatatcttcatatcaagtctagacagaagcattctcagaaacgtctttgtgatgtatgcattcaactcatagagttgaacattccctttcagagagcagctttgaagcactctttttgtagtatgtgcaagtggacatttggagcgctttgaggcctacggggaaaaagcaaatatcttcccataaccactagacagaaacattctcagaaactccgttatgacgtatgcactcacctaacagagaagaacctaccttttgactgagcagttttgatacactctttttgcagaatctgcaagtggatatttggatagctgtgaagatttcgttggaaacgggaatatcttcctataaaatctagacagaagcattctcagaaactgctctgtgatgtctgcattcaagtcacagagttgaacattgcctttcatagagcaggtttgaaacgctctttttgtagtatatggaagtggacgtttcggacggtttgaggcccacggtgataaagggaatatcttcccctacaagctagaaagaagcattctgtgaaacttgtttgtgatgtgtgtactcaactaacagagttgaacctttcttttcacagagcagttttgaaacactctttttgtagaatctgcgaggggatatttggatagatttctggatttcgttggaaacgggaatatcttcatataaaatctcgacagaagcattctgagaagcttctttgtgatatgtgcattcaagtcacagagttgaatattccctttcacagagtaggtttgaaacactctttttgtagtatctggaagtggacattttgagcaccttgacgcctacggtgaaaagggaaatatcttctcataaaaagtagacagaagcaatctcagaatcttctttgggatatatgcacgcagctaacagagttgaacctttgtattgacagagcagttttgaaacagtctttctgtggaatctggaagtggatatttggatagcttggaggatttcgttggaaacgggattaagtataaaaagtagacagcagcatcctcagaaacttctttgtgatgtgtgcattcaagtcacagagttgaacattccctttcgtaccgcagttttgaaacactctttctgtattatctggaagtgaacattaggacagctttcaggtctatggtgagaaaggaaatatcttcaaataaaaactagacagaagcattctcataaacttgtttgtgatgtgtgaactcagctaacagaggtggatctttcttttgatagagcagttctgaaaaacactttttgttgaatctgcaagtggacatttggatagattttaagatttcgttggaaacgggaatatcttcatatcaaatctagacagaagcattctcagaaacgtctttgtgatgtttgcattcaactcatagagttgaacattccgtttcagagggcagctttgaagcactctttttgtagtatgtgcaagtggatatttggagcgctgtgaggtctacggtgaaaaagcaaatatcttcccataaccactagactgaaacattctcagaaactcctttatgacgtatgtactcaactaacagagaagaaccttctttttgacagaacagttttgatacactctttttgtagaatctccaagtggatatttggatagctgtgaagatttcgttggaaacgggaatatcttcctataaaatctagacagaagcattctcagaaactgctctgtgatgtctgcattcaagtcacagagttgaacggttgcctttcatagagcaggtttgaaacgctctttttgtagtatatggaagtggacttatcggacggtttgaggcccatggtgataaagggaatatcttcccctacaagctagaaagaagcattgtgtgaaacttgtttgtgatgtgtgtactcaactaacagagttgaacctttcttttcacagagcagtattgaaacactctttttgtagaatctgcgaggggatatttggatagatttcagcatttcgttggaaacgggaatatcttcatataaaatctcgacagaagcattctcagaaacttctttgtgatatgtgcattcaagtcacagagttgaatattccctttcacagagtaggtttgaaacactctttttgtagtatctggaagtggacatttggagcgccttgacacctacggtgaaaagggaaatatttcccataaaaactagacagaagcaatctcagaatcttctttgggatacatgcacgcagctaacagagttgaacctttctattgacagagcagttttgaaacagtctttctgtgtaatctgcaagtggatatttggatagcttggaggatttcgttggaaacgggattacgtataaaaagtagacagcagcatcctcagaaacttctttgtgatgtgtgcattcaagtcacagagttcaacattccctttcgtacagcagttttgaaacactctttctgtagtatctggaagtgaacattaggacagctttcaggtctatggtgagaaaggaaatatcttcaaataaaaactagacagaaagcattctgataaacttgtttgtgaagtgtgatctcagctaacagaggtggatctttcttttgatagagcagttctgaaaaacactttttgttgaatctgcaagtggacatttggatagatttgaagatttcgttggaaacgggaatatcttcatatcaaatctagacagaagcattctcagaaacgtctttgtcatgtttgcattcaactcatagagttgaacattccctttcagagagcagctttggaacactctttttgtagtatgtgcaagtggatatttggagcgctctgaggcctacggtgaaaaagaaaatatcttcccataaccactagacagaaacattctcagaaactcctttatgacgtatgcactcacctaacagagaagaaccttccttttgacagagcagttttgatacactctttttgcagaatctgcaactggatatttggatagctgtgaagatttcgttggaaacgggaatatcttcctataaaatctagacagaagcattctcagaaactgctctgtgatgtctgcattcaagtcacagagttgaacattgcctttcatagagcaggtttgaaacgctctttttgtagtatatggaagtggatgtttcggacggttggaggcccatggtgatgaagggaatatcttcccctacaagctagaaagaagcattctgtgaaacttgtttgtgatgtgtgtactcaactaacagagttcaacctttctttttacagagcagttttgaaacactctttttgtagaatctgcgaggggatatttggatagatttcaggatttcattggaaacgggaatatcttcatataaaatctcgacagaagcattctcagaaacttctttgtgatatctgcattcaagtcacagagttgaatattccctttcacagagtaggtttgaaacactctttttgtagtatctggaagtggacatttggagcgccttgacacctatggtgaaaagggaaatatcttcccataaaaactagacagaagcaatctcagaatcttctttgggatatatgcacgcagctaacagagttgaacctttctattgacagagcagttttgaaacagtctttctgtggaatctgcaagtggatatttggatagcttggaggatttcgttggaaacgggattacctataaaaagtagacagcagcatcctcagaaacttctttgtgatgtgttcattcaagtcacagagttgaacattccttttcgtacagcagttttgaaacactctttctgtagtatctggaagtgaacattaggacagctttcaggtctatggtgagaaaggcaatatcttcaaataaaaactagacagaagcattctcataaaacttgtttgtgatgtgtgaactcagctaacagacgtggatctttcttttgatagagcagttctgaaaaacacgttttgttgaatctgcaagtggacatttggatagatttgaagatttcgttggaaacgggaatatcttcatatcaaatctagacagaagcattctcagaaacgtctttgtgatgtttgcattcaactcatagagttgaacattccgtttcagagaccagctttgaagcactctttttgtagtatgtgcaagtggatatttggagcgctctgaggcctacggtgtaaaagcaaatatcttcccataaccactagacagaaacattctcagaaactcctttatgacgtatgcactcacctaacagagaagaaccttccttttgacagagcagttttgatgcactctttttgtagaatctgcaagtggatatttggatagctgtgaatatttcgttggaaacgggaataccttcctataaaatctagacagaagcattctcagaaactgctctgtgatgtctgcattgaagtcacagaattgaacattgcctttcctagagcaggtttgaaacgctctttttgtagtatatggaagtggacgtttcggacggttggaggcccagggtgataaagggaatatcttcccctacaagctagaaagaagcattctgtgaaacttgtttgtgatgtgtgtactcaactaacggagttgaacctttctttttacagagcagttttgaaacactctttttgtagaatctgcgaggggatatttggatagatttcaggatttcgttggaaacgggaatatcttcatataaaatctcgacagaagcattctcagaagcttctttgtgatatgtgcattcaagtcacagagttgaatattccctttcacagggtaggtttgaaacactctttttgtagtatctggaagtggacatttggagcgccttgacgcctacgttgaaaagggaaatatcttctcataaaaagtagacagaagcaatctcagaatcttctttgggatatatggacacagctaacagagttgaacttttctattgacagagcagttttgaaacagtctttctgtggaatctgcaagtggatatttggatagcttggaggatttcgttggaaacgggattacgtataaaaagtagacagcagcatcctcagaagcttctttgtgatgtgtgcattcaagtcacagagttgaacattccctttcgtacagcagttttgaaacactctttctgtagtatctggaagtgaacattaggacagctttcaggtctatggtgagaaaggaaatatcttcaaataaaaactagacagaagcattctcataaacttgtttgtgatgtctgaactcagctaacagaggtggatctttcttttgatagagcagttctgaaaaacactttttgttgaatctgcaagtggacatttggatagatttgaagatttcgttagaaacgggaatatcttcatatcaaatctagacagaagcattctcagaaacgtctttgtgatgtttgcattcaactcatagagttgaacattccgtttcagagagcagctttgaagcactctttttgtagtatgtgcaagtggatatttggagcgctctgaggcctacggtgaaaaaggaaatatcttcccataaccattagacagaaacattctcagaaactcctttatgacgtatgcactcacctaactgagaagaaccttccttttgacagagcagttttgatacactctttttgtagaatctgcaagtggatatttggatagctgtgaagatttcgttggaaacgggaatatcttcctataaaatctagacagaagcattctcagaaactgctctgtgatgtctgcattcaagtcacagagttgaacattgcctttcatagagcaggtttgaaacgctctttttgtagtatgtggaagtggacgtttcggacggtttgaggcccatggtgataaagggaatatcttcccctacaagctagaaagaagcattctgtgaaacttgtttgtgatgtgtgtactccactaacagagttgaacctttctttttacagagcagttttgaaacactctttttgtagaatctgtgaggggatatttggatagatttcaggatttcgttggaaacgggaatatcttcatataaaatctcgacagaagcattctcagtaaacttctttgtgatatctgcattcaagtcacagagttgaatattccctttcacagagtaggtttgaaacactctttttgtagtatctggaagtggacattttgagcgccttgacacctacggtgaaaagggaaatatcttcccataaaaactagacagaagcaatctcagaatcttctttgggatatatgcacgcagctaacagagttgaacctttctattgacagagcggttttgaaacagtctttctgtggaatctgcaagtggatatttggatagcttggaggatttcgttggaaacgggattaagtataaaaagtagacagcagcatcctcagaaacttctttgtgatgtgtgcattcaagtcacagagttgaacattccctttcgtacagcagttttgaaacactctttctgtagtaactggaagtgaacattaggacagctttcaggtctatggtgagaaaggaaatatcttcaaataaaaactagacaaaagcattgtcataaacatgtttgtgatgtgtgaaatcagctaacagaggtggatctttcttttgatagagcagttctgaaaaacactttttgttgaatctggaagtggacatttggatagatttgaagatttcgttggaaacgggaatatcttcatatcaaatctagacagaagcattctcagaaacgtctttgtgatgtttgcattcaactcacagagttgaacattccctttcagagagcagctttgaagcactctttttgtagtatgtgcaaggggatatttggagcgctctgaggcctacggtgaaaaagcaaatatcttcccataaccagtagacagaaacattctcagaaactcctttatgacgtatgcactcacctaacagaaaagaaccttccttttgacagagcagttttgatacactctttttgtagaatctgcaagtggatatttggatagctgtgaagatttcgttggaaacgggaatatcttcctatgaaatctagacagaagcattctcagaaactgctctgtgatgtctgcattcaagtcacagagttgaacattgcctttcatagagcaggtttgaaacgctctttttgtactatatggaagtagacgattcggaccgtttgaggcccatggtgataaagggaatatcttcccctacaagctagaaagaagcattctgtgaaacttgtttgtgatgtgtgtactcaactaacagagttgaacctttctttttacagagcagttttgaaacactctttttgtagaatctgtgaggggatatttggatagatttcaggatttcgttggaaacggtaatatcttcatataaaatctcgacagaagcattctcagaaacttctttgtgatatgtgcattcaagtcacagagttgaatattccctttcacagagtaggtttgaaacactctttttgtagtatctggaagtggacatttggagcgccttgacgcctacggtggaaagggaaatatcttcccataaaaactggacagaagcaatctcagaatcttctttgggatatatgcacgcagctaacagagttgaacctttctattgacagaccagttttgaaacagtctttctgtggaatctgcaagtggatatttggatagcttggaggatttcgttggaaacgggattaagtataaaaagtagacagcagcatcctcagaaacttctttgtgatgtgtgcattcaagtcacagagttgaacaatccctttcgtacagcagttttgaaacacactttctgtagcatctggaagtgaacattaggacagctttcaggtctatggtgagaaaggaaatatcttcaaataaaaactagacagaagcattctcataaacttgtttgtgatgtgtgaactcagctaacagaggtggatctttcttttgatagagcagttctgaaaaacactttttgttgaatctgcaagtggatatttggatagatttgaagatttcgttggaaacgggaatatcttcatatcaaatctaaacagaagcattctcagaaacgtctttgtgatgtttgcattcaactcatagagttgaacattccgtttcagagagcagctttgaagcactctttttgtagtatgtgcaagtggatatttggagcgctgtgaggcctacagtgaaaaagcaaatatcttcccataaccactagacagaaacattctcagaaaatcctttatgacgtatgtactcaactaacagagaagaaccctccttttgacagagcagttttgatacactctttttgtagaatctgcaagtggatatatggatagctgtgaagatttcgttggaaacgggaatatcttcctataaaatctagacagaagcattctcagaaactgctctgtgatgtctgcattcaagtcacagagttgaacattgcctttcctagagcaggtttgaaacgctctttttgtagtatatggaagtggacggttcggacggtttgaggcccatggtgataaagggaatatcttcccctacaagctagaaagaagcattctgtgaaacttctttgtgatgtgtgtactcaactaacagagttgaacctttctttttacagagcagttttgaaacactctttttatagaatctgcgaggggatatttggatagatttcaggatttcgttggaaacgggaatatcttcatataaaatctcgacagaagcattctcagaaagttctttgtgatatctccattcaagtcaccgagttgaatattccctttcacagagtaggtttgaaacactctttttgtagtatctggaagtggacatttggagcgccttgacgcctacggtgaaaagggaaatatcttcccataaaaactagacagagcaatctcagaatcttctttgggatatatgcacgcagctaacagagttgaacctttctattgacagagcagttttgaaacagtctttctgtggaatctgcaagtggatatttggatagcttggaggatttcgttggaaacgggattacgtataaaaagtagacagcagcatcctcagaaacttctttgtgatgtgtgcattcaagtcacagagttgaacattccctttcgtacagcagttttgaaacactctttctgtagtatctggaagtgaacattaggacagctttcaggtctatggtgagaagggaaatatcttcaaataaatactagacagaagctttctgataaacttgtttgtgaagtgtgaactcagctaacagaggtggatctttcttttgatacagcagttttgaaaaacactttgttgaatctgcaagtggacatttggatagatttgaagatttcgttggaaacgggaatatcttcatatcaaatctagacagaagcattctcagaaacgtctttgcgatgtttgcattcaactcatagagttgcacattccgtttcagagagcagctttgaggcactctttttgtagtatgtgcaagtggatattttgagccctctgaggcctacggtgaaaaagcaaatatcttcccataaccactagacagaaacattctcagaaactcctttatgacgtatgtactcaactaacagagaagaaccttccttttgacagagcagttttgatacactcttttgtagtatctgcaagtggatacttggatagctgtgaagatttcattggaaacgggaatatcttcctataaagtctggacagaagcattctcagaaactgctctgtgttgtctgcattcaagtcacagagttgaacattgcctttcatagagcaggtttgaaacactctttttgtagtatatggaagtggacgtttcggacggtttgaggcccatggtgttttagggaatatcttcccctacaagctagaaagaagcattctgtgaaacttgtttgtgatgtgtgtactcaactaaaagagttgaacctttctttttacagagcagttttgaaacactctttttgtagaatctgcgaggggatatttggataggtttcaggatttcgttggaaacgggaatatcttcatataaaatctcgacagaagcattctcagaaacttctttgtgatatgtgcattcaagtcacagagttgaatattccctttcacagagtaggtttgaaacactctttttgtagtatctggaagtggacatttggagcgccttgacacctacagtgaaaagggaaatatcttctcataaaaagtagacagaagcaatctcagaatcttctttgggatatatgcacgcagctaacagagttgaacctttctattgacagagcagttttgaaacagtctttttgtggaatctgcaagtggatatttggatagcttggaggatttctttggaaacgggattacgtataaaaagtagacagcagcatcctcagaaacttctttgtgatgtatgcattcaagtcccagagttgaacattccctttcgtacagcagttttgaaacactctttctgtagtatctggaagtgaacattaggacagctttcaggtctatggtgagaaaggaaatatcttcaaataaaaactagacagaaagcattctcataaacttgtttgtgatgtgtgaactcagctaacagacgtggatctttctttagatagagcagttttgaaaaacactttttgttgaatctgcaagtggacatttggatagatttgaagatttcgttggaaacgggaatatcttcatatcaaatctagacagaagcattctcagaaacgtctttgtgatgtttgcattcaactcatagagttgaacattccctttcagagagcagctttgaagcactctttttgtagcatgtgcaagtggacatttggagcgccctgaggcctacgggaaaaagcaaatatcttcccataaccactagacagaaacattctcagaaactcctttatgacgtatgcactcacctaacagagaagaaccttccttttgacagagcagttttgatacactctttttgtagtatctgcaagtggatatttggatagctgtgaagatttcgttggaaacgggaatatcttcctataaaatctagacagaagcattctcagaaactgctctgtgatgtctgcattcaagtcacagagttgaacattgcctttcatagagtaggtttgaaacgctctttttgtagtatatggaagtggacgtttcggacggtttgaggcccatggtgttaaagggaatatcttcccctacaagctagaaagaagcattctgtgaaactggtttgtaatgtgtgtactcaactaacagagttgaacctttctttttacagagcagttttgaaacactctttttgtagaatctgcgaggggatatttggatagatttcagggtttcgttggaaacgggaatatcttcatataaaatctcgacagaagcattctcagaaacttctttgtgatatgtgcattcaagtcacagagttgaatattccctttcacagagtaggtttgaaacactctttttgtagtatctggaagtggacatttggagcgccttgacacctacggtgaaaagggaaaatatcttctcataaaaagtagacagaagcaatctcagaatcttctttgggatatatgcacacagctaacagagttgaacctttctattgacagagcagttttgaaacagtctttctgtagaatctgcaagtggatatttggatagcttggaggatttcgttggaaacgggattacgtataaaaagtagacagcagcatcctcagaaacttctttgtgatgtgtgcattcaagtcacagagttgaacattccctttcgtacagcagttttgaaacactctttctgtagtaactggaagtgaacattaggacagctttcaggtctatggtgagaaaggaaatatcttcaattaaaaactagacggaagcattctcgtaaacttgtttgtgatgtgtggactcagctaacagaggcggatctttcttttgatagagcagttcgggaaaacactttttgttgaatctgcaagtggacatttggatagatttgaagatttcgttggaaacgggaatatcttcatatcaaatctagacagaagcattctcagaaacgtctttgtgatgtttgcattcaactcatagagttgaacattccgtttcagagggcagctttgaagcactctttttgtagtatgtgcaagtggatatttggagcgctgtgagctctgcggtgaaaaagcaaatatcttcccataaccactagactgaaacattctcagaaactcctttatgacgtatgcactcacctaacagagaagaagcttccttttgacagagcagttttgatacactctttttgtagaatctgcaactggatatttggatagctgtgaagatttcgttggaaacgggaatatcttcctataaaatctagacagaagcattctcagaaactgctctgtgatgtctgcattcaagtcacagagttgaacattgcctttcatagagcaggtttgaaacgctctttttgtagtatatggaagtggacgtttcggacggtttgaggcccatgttgataaagggaatatcttcccctacaagctagaaagaagcattctgtgaaacttgtttgtgatgtgtgtactcaactaacagagttgaacctttctttttacagagcagttttgaaacactctttttgtataatctgcgaggggatatttggatacatttcaggatttcgttggaaacgggaatatcttcatataaaatctcgacagaagcattctcagaaacttccttgtgttatgtgcattcaagtcacagagttgaatattccctttcacagagtaggtttgaaacactctttttgtagtatctggaagtggacatttggagcgccttgacgcctacggtgaaaagggaaatatcttcccataaaaactagacagaagcaatctcagaattttctttgggatatatgcacacagctaactgagttgaacttttctattgacatagcagttttgaaacagtctttctgtggaatctgcaagtggatatttggatagcttggaggatttcgttggaaatgggattacgtataaaaagtagacagcagcatcctcagaaatttctttgtgatgtgtgcattcaagtcacagagttgaacattccctttcgtacagcagttttgaaacactctttctgtagtatctggaagtgaacattaggacagctttcaggtctatggtgagaaaggaaatatctttaaataaaaactagacagaagcattctcataaacttgtttgtgatgtgtgaactcagctaacagaggtggatctttcttttgatagagcagttctgaaaaacacgttttgttgaatctgcaagtggacatttggatagatttgaagatttcgttggaaacgggaatatcttcatatcaaatctagaaagaagcattctcagaaacgtctttgtgatgtttgcattcaactcatagagttgaacattccctttcaaagaacagctttgaagcactctttttgtagtatgtgcaagtggatatttggagcgctctgaggcctacggtgaaaaagcaaatatcttcccataaccactagacagaacattctcagaaactcctttatgacgtatgcactcacctaacagaaaagaaccttccttttgacagagcagttttgatacactctttttgtagaatctgcaagtggatatttggatagctgtgaagatttcgttggaaacgggaatatcttcctataaaatctagacagataagcattctcagaaactgctctgtgatgtctgcattcaagtcacagagttgaacattgcctttcatagagcaggtttgaaacgctctttttgtagtatatggaagtggatgtttcggacggttggaggcccatggtgataaagggaatatcttcccctacaagctagaaagaagcattctgtgaaacttgtttgtgatgtgtgtactcaactaacagagttgaacctttcattttacagagcagtttagaaacactctttttgtagaatctgcgaggggatatttggatagatttcaggatttcgttggaaacgggaatatcttcatttaaaatctcgacagaagcattctcagaaacttccttgtgatatgtgcattgaagtcacagagttgaatattccctttcacagagtaggtttgaaacactctttttgtagtatctggaagtggacatttggagcgccttgacacctactgtgaaaagggaaatatctacccataaaaactagacagaagcaatctcagaatcttctttgggatatatgcacgcagctaacagagttgaacctttctattgacagagcggttttgaaacagtctttctgtggaatctgcaagtggatatttggatagcttggaggatttcgttggaaacgggattaagtatgaaaagtagacagcagcatcctcagaaacttctttgtgatgtgtgcattcaagtcacagagttgaacattccctttcatacagcagttttgaaacactctttctgtagtatctggaagtgaacattaggacagctttcaggtctatggtgagaaaggaaatatcttcaaataaaaactagacagaagcattctcataaacttgtttgtgatgtgtgaactcagctaacagaggtggatctttcttttgatagagcagttgtgaaaaacactttttgttgattatgcaagtggatatttggatagatttgaagatttcgttggaaacgggaatatcttcatatcaaatctagacagaagcattctcagaaacgtctttgtgatgtttgcattcaactcatagagttgaacattctgtttcagagagcaggtttgaagcactctttttgtagtatgtgcaagtggatatttggagcgctctgaggcctacggtgaaaaagcaaatatcttcccataaccactagacagaaacattctcagaaactcctttatgacgtatgcactcacctaacagaaaagaaccttccttttgacagagcagttctgatacactctttttgtagaatctgcaagtggatatttggatagctgtgaagatttcgttggaaacgggaatatcttcctataaaatctagacagaagcattctcagaaactgctctgtgatgtctgcattcaagtcacagagttgaacattgcctttcatagagcaggtttgaaacgctctttttgtagtatatggaagtggatgtttcggacggttggaggcccatggtgataaagggaatatcttcccctgcaagctagaaagagagcattctgtgaacttgtttgtgatgtgtgtactcaactaacagagttgaacctttctttttacagagcagttttgaaacactctttttgtagaatctgcgaggggatatttggatagatttcaggatttcgttggaaacgggaatatcttcatataaaatctcgacagagcattctcagaaacttctttgtgatatgtgcattcaagtcacagagttgaatattcccttttacagagtaggtttgaaacactctttttgtagtatctggaagtggacatttggagcgccttgacgcctacggtgaaaagggaaatatcttctcataaaaactagacagaagaaatctcagaatcatctttgggatatatgcacgcagctaacagagttgaacctttctattgacagagcagttttgaaacagtctttctgtggaatctgcaagtggatatttggatagcttggaggatttcgttggaaacgggattaggtataaaaagtagacagcagcatcctcagaaacttctttgtgatgtgtgcattcaagtcacagagttgaacattccctttcgtacagcagttttgaaacactctttctggagtatctggaagtgaacattaggacagctttcagctctatggtgagaaaggtaatatcttcaaataaaaactagacagaagcattctcataaacttgtttgtgatgtgtgaactcagctaacagacgtggatctttcttttgatacagcagttttgaaaaacactttttgttgaatctgaaagtggacatttggatagatttgaagatttccttggaaacgggaatatcttcatatcaaatctagacagaagcattctcagtaaacgtctttgtgatgtttgcattcaactcatagagttgaacattccgtttcagagaccagctttgaagcactctttttgtagtatgtgcaagtggatatttggagcgctctgaggcctacggtgaaaaagcaaatatcttcccataacgactagacagaaaacattctcagaaactcctttatgacgtatgcactcacctaacagagaagaaccttccttttgacagagcagttttgatacactctttttgtagaatctgcaagtggatattttgatacctgtgaatatttcgttggaaacgggaatatcttcctataaaatctagacagaagcattctcagaaactgctctgtgatgtctgcattcaagtcacagagttgaacattgcctttcatagagcaggtttgaaaggctctttttgtagtatatggaagtggacgtttcggacggttggaggcccatggtgataaagggaatatcttcccctacaagctagaaagaagcattctgtgaaacttgtttgttatgtgtgtactcaactaacagagttgaacctttctttttacagagcagttttgaaacactctttttgtagaatctgcgaggggatatttggatagatttcaggattttgttggaaaccggaatatctttatataaaatctcgacagaagcattctcggaagcttctttgtgatatgtgcattcaagtcacagagttgaatattccctttcacagagtaggtttgaaacactctttttctagtatctggaagtggacatttggagcgccttgatgcctacggtgaaaagggaaatatcttctcataaaaagtagacagaagcaatctcagaatcttctttgggatatatgcacgcagctaacagagttgaacctttctattgacagagcagttttgaaacagtctttctgtggaatctgcaagtggatatttggatagcttggaggatttcgttggaaacggtattacgtataaaaagtagacagcagcatcctcagaaacttctttgtgatgtgtgcattcaagtcacagagttgaacattccctttcgtacagcagttttgaaacactctttctgtagtatctggaagtgaacattaggacagctttcaggtctatggtgagaaagaaaatatcttcaaataaaaactagacaaaagcattctcataaacttgtttgtgaagtgtgaactcagctaacagaggtgaatctttcttttgatagagcagttctgaaaaacactttttgttgaatctgcaagtggacatttggatagatttgaagatttcgttggaaacgggaatatcttcatatcaaatctagacagaagcattctcagaaacgtctttgtgatgtttgcattcaactcatagagttgaacattccctttcagagagcagctttgaagcactctttttgcagtatgtgcaagtggatatttggagcgctctgaggcctacggggaaaaagcaaatatcttcccataaccactagacagaaacattctcaggaactcctttatgatgtatgcactcacctaacagagaagaaccttccttttgacagagcagttttgatacactctttttgtagaatctgcaagtttatatttggatagctgtgaagatttcgttggaaacgggaatatcttcctataaaatctagacagaagcattctcagaaactgctctgtgatgtctgcattcaagtcacagagttgaacattgcctttcatagagcaggtttgaaatgctctttttgtagtatatggaagtggaagtttcagacggtttgaggcccatggtgataaagggaatatcttcccctacaagctagaaagaaacattctgtgaaacttgtttgtgatgtgtgtactcagctaacagagttgaacctttctttttacagagcagttttgaaacactctttttgtagaatctgcgaggggatatttggatagatttcaggatttcgttggaaaagggaatatcttcatataaaatctcgacagaagcattctcagaaacttctttgtgatatctgcattcaagtcacagagttgaatattccctttcacagagtaggtttgaaacactctttttgtagtatctggaagtggacatttggagcgccttgacgcctacggtgaaaagggaaatatcttctcataaaaagtagacagaaagcaatctcagaatcttctttgggatatatgcacgcagctaacagagttgaacctttctattgacagagcagttttgaaacagtctttctgtggaatctgcaagtggatattgggatagcttggaggatttcgttggaaacgggattacgcataaaaagtagacagcagcatcctcagaaacttctttgtgatgtgtgcattcaagtcacagagttgaacattccctttcgtacagcagtattgaaacactctttctgtagcatctggaagtgaacattaggacagctttcaggtctatggtgagaaaggaaatatcttcaaataaaaactagacagaagcattctcataaacttgtttgtgatgtgtgaactcagctaacagaggtggatttttcttttgatagagcagttctgaaaaacactttttgttgaatctgcaagtggacatttggatagatttgaagatttcgttggaaacgggaatatcttcatatcaaatctagacagaagcattctcagaaacgtctttgtgatgtttgcattcaactcacagagttgaacattccctttcagagagcagctttgaagcactctttttgtagtatgtgcaaggggatatttggagtgctctgaggcctacggtgaaaaagcaaatatcttcccataaccactagacagaaacattctcagaaactcctttatgacgtatgcactcacctaacagaaaagaaccttccttttgacagagcagttttgatacactctttttgtagaatctgcaagtggatatttggatagctgtgaagatttcgttggaaacgggaatatcttcctataaaatctacacagaagcattctcagaaactgctctgtgatgtctgcattcaagtcacagagttgaacattgcctttcatagagcaggtttgaaacgctctttttgtagtatatggaagtggacgtttcagacggtttgaggcccatggtgttaaagggaatatcttcccctacaagctagaaagaagcattctgtgaaacttgtttgtgatgtgtgtactcaactaacagagttgaacctttctttttacagagcagttttgaaacactctttttgtagaatctgcgagggaatatttggatagattttaggatttcgttggaaacgggaatatcttcatataaaatctcgacagaagcattctcagaagcttctttgtgatatgtgcactcaagtcacagagttgaacattccctttcacagagtaggtttgaaacactctttttgtagtatctggaagtggacatttggagcgccttgacgcctacggtgaaaagggaaatatcttcccataaaaactagacagaaagcaatctcagaatcttctttgggatatatgcacgcagctaacagagttgaacctttctattgacagagcagttttgaaacagtctttctgtggaatctgcaagtggatatttggatagcttggaggatttcgttggaaacgggattacgtataaaaagtagacagcagcatcctcagaaacttctttgtgatgtgtgcattcaagtcacagagttgaacattctctttcgtacagcagttttgaaacactctttctgtagtatctggaagtgaacattaggacagctttcaggtctatggtgagaaaggaaatatcttcaaataaaaactagacagaagcattctcataaacttgtttgtgatgtgtgaactcagctaacagaggtggatctttcttttgatagagcagttctgaaaaacacgttttgttgaatctgcaagtggacatttggatagatttgaagatttcgttggaaaagggaatatcttcatatcaaatctagacagaagcattctcagaaacgtctttgtgatgtttgcattcaactcatagagttgaacattccgtttcagagaccagctttgaggcactctttttgtagtatgtgcaagtggatatttggagcgctctgaggcctacggtgaaaaagcaaatatcttcccataacgactagacagaaacattctcagaaactcctttatgacgtatgcactcacctaacagagaataaccttccttttgacagagcagttttgatacactctttttgtaggatctgcaagtggatatttggatagctgtgaagatttcgttggaaacgggaatatcttcctataaaatctagacagaagcattctcagaaactgctctgtgatgtctgcattcaagtcacagagttgaacattgcctttcctagagcaggtttgaaacgctctttttgtagtatatggaagtggatgtttcggacggttggaggcccatggtgataaagggaatatcttcccctacaagctagaaagaagcattctgtgaaacttgtttgtgatgtgtgtactaaactaacagagttgaacctttctttttacagagcagttttgaaacactctttttgtagaatctgcgaggggatatttggatagatttcaggatttcgttggaaacgggaatatcttcatataaaatctcgacagaagcattctcagaaacttctttgtgatatgtgcattcaagtcacagagttgaatattccctttcacagagtaggtttgaaacactctttttgtagtatctggaagtggacatttggagcgccttgaggcctacggtgaaaagggaaatatcttctcataaaaagtagacagaaagcaatctcagaatcttctttgggatatatgcacgcaactaacagagttgaacctttctattgacagagcagttttgaaacagtctttctgtggaatctgcaagtggatatttggatagcttggaggatttctttggaaatgggattacgtataaaaagtagacagcagcatcctcagaaacttctttgtgatgtgtgcattcaagtcacagagttgaacattccctttcgtacagcagttttgaaacactctttctgtagtatctggaagtgaacattaggacagctttcaggtcgatggtgagaaagggaatatcttcaaataaaaactagacagaagcattctcataaacttgtttgtgatgtgtgaactcagctaacagacgtggatctttcttttgatacagcagttttgaaaaacactttttgttgaatctgcaagtggacatttggatagatatgaagatttcgttggaaacggtaatatcttcatatcaaatctagacagaagcattcttggaaacgtctttgtgatgtttgcattcaactcatagagttgaacattccgtttcagagagcagctttgaagcattctttttgtagtatgtgcatggggatatatggagcgctctgaggcctaaggtgaaaaagcaaatatcttcccataaccactacacagaaacattctcagaaactcctttatgacgtatgcactcacctaacagagaagaaccttccttttgacagagcagttttgataaactcattttgtagaatctgcaagtggatatttggatagctgtgaagatttcgttggaaacgggagtatcttcctataaaatctagacagaagcattctcagaaactgctctgtgatgtctgcattcaagtcacagagttgaacattgcctttcatagagcaggtttgaaacgctctttttgtagtacatggaagtggacgtttcggacggtttgaggcccatggtgataaagggaatatcttcccctactagctagaaagaagcattctgtgaaacttgtttgtgatgtgtgtactcaactaacagagttgaacctttctttttacagagcagttttgaaacactctttttgtagaatctgcgaggggatatttggatagatttcaggatttcgttggaaaggggaatatcttcatataaaatctggacagaagcattctcagaaacttctttgtggtatgtgcattcaagtcacagagttgaatattccctttcacagagtaggtttgaaacactctttttgtagtatctggaagtggacatttttagcgccttgacgcctacagtgaaaagggaaatatcttcccataaaaactagacagaagcaatctcagaatcttctttgggatatatgcacgcagctaacagagttgaacctttttattgacagagcaattttgaaacagtcttgctgtggaatctgcaagtggatatttggatagattagaggatttcgttggaaacgggattacgtataaaaagtagacagcagcatcctcagaaacttttttgtgatgtgtgcattcaagtcacagagttgaacattccctttcgtacagcagttttgaaacaccctttctgtagtatctggaagtgaacattaggacagctttcaggtctatggtgagaaaggaaatatcttcaaataaaaactagacagaagcattctcataaacttgtttgtgatgtgtgaactcagctaacagagatggatctttcttttgatagagcagttctgaaaaacactttttgttgaatctgcaagtggacatttggatagatttgaagatttcgttggaaacgggaatatcttcatatcaaatctagacagaagcattctcagagacgtctttgtgatgtttgcattcaactcatagagttgaacattccgtttcagagagcagctttgaggcactcatttttgtagtatgtgcaagtggatatttggagcgctctgaggcctacggtgaaaaagcaaatatcttcccataaccactagacagaaacattctcagaaactcctttatgacgtgtgtactcatctaacagagaagaaccttccttttgacagagcagttttgatacactctttttgtagaatctgcaagtggatattgggatagctgtgaagatttcgttggaaacgggaatatcttcctataaaatctagacagaagcacttctcagaaactgctctgtgatgtctgcattcaagtcacagagttgaacattgcctttcatagagcaggtttgaaacgctctttttgtagtatatggaagtggacgtttcggacggtctgaggcccatggtgataaagggaatatcttcccctataagctagaaagaagcattctgtgaaacttgtttgtgatgtgtgtactcaagtaacagagttgaacctttctttttacagagcagttttgaaacactctttctgtagaatctgcgacgggatatttggatagatttcaggatttcgttggaaacgggaatatcttcatataaaatctcgacagaagcattctcagaaacttctttgtgatatctgccttcaagtcacagagttgaatattccctttcacagagtaggtttgaaacactctttttgtagtatctggaagtggacatttggagtgccttgacgcctacggtgacaagggaaatatcttcccataaaaactagacagaagcaatctcagaatcttctttgggatatatgcacgcagctaacagagttcaacctttctattgacagagcagttttgaaacagtctttctgtggaatctgcaagtggatatttggatagcttggaggatttcgttggaaacgggattacgtataaaaagtagacagcagcatcctcagaaacttctttgtgatgtgtgcattcaagtcacagagttgaacattccctttcgtacagcagttttgaaacactctttctgtagtatctggaagtgaacattaggagagctttcaggtctatggtgagaaaggaaatatcttcaaataaaaactagacagaagcattctgataaacttgtttgtgaagtgtgaactcagctaacagaggtggatctttcttttgattgagcagttctgaaaaacactttttgttgaatctgcaagtggacatttggatagatttgaagatttcgttggaaacgggaatatcttcatatcaaatctagacagaagcattctcagaaacgtctttgcgatgtttgcattcaactcatagagttgaacattccgtttcagagagcagctttgagacactctttttgtagtatgtgcaagtggatatttggagtgctctgaggcctacggtgaaaaagcaaatatcttcccataaccactagacagaaacattctcagaaactcctttatgacgtatgtactcaactaacagagaagaaccttccttttgacagaggagttttgatacactctttttgtagaatctgcaagtggatatttggatagctgtgaagatttcgttggaaacgggaatatcttcctataaaatctagacagaagcattctcagaaactgctctgtgatgtctgcattcaagtcacagagttgaacattgcctttcctagagcaggtttgaaacgctctttttgtagtatatggaagtggacgttttggacggtttgaggcccatggtgataaagggaatatcttcccctacaagctagaaagaagcattctgtgaaacttgtttgtgatgtgtgtactcaactaacagagttgaacctttctttttacagagcagttttgaaacactctttttgtagaatctgcgaggggatatttggagagatttcaggatttcgttggaaacgggaatatcttcatataaaatctcgacagaagcattctcagtaaacttctttgtgatatgtgcattcaagtcacagagttgaatattccctttcacagagtaggtttgaaacactctttttgtagtatctggaagtggacatttggagcgccttgacgcctacggtgaaaagggaaatatcttcccataaaaactagacagaagcaatctcagaatcttctttgggatatatgcacgcagctaacagagttgaacctttctattgacagcagttttgaaacagtctttctgtggaatctgccagtggatatttggatagcttggaggatttcgttggaaacaggattacgtataaaaagtagacagcagcatcctcagaaacttctttgtgatgtgtgcattcaagtcacagcagttgaacattccctttcgtacagcagttttgaaacactctttctgtagtatctggaagtgaacattaggacagctttcaggtctatggtgagaaaggaaatatcttcaaataaaaactagacagaagcattctaataaacttgtttgtgaagtgtgaactcagctaacagtggtggatctttcttttgatacagcagttttgaaaaacactttgttgaatctgcaagtggacatttggatagatttgaagatttcgttggaaacgggaatatcttcatatcaaatctagacagaagcattctcagaaacgtctttgtgatgtttgcattcaactcatagagttgaacattccctttcagagagcagctttgaagcactctttttgtagcatgtgcaagtggacatttggagcgccctgaggcctatggggaaaaagcaaatatcttcccataaccactagacagaaacattctcagaaactcctttatgacgtatgcactcacctaacagagaagaaccttccttttgacagagcagttttgatacactctttttgtagaatctgcaagtggatattgggatagctgtgaagatttcgttggaaacgggaatatcttcctatgaaatctagacagaagcattctcagaaactgctctgtgatgtctgctttcaagtcacagagttgaacattgcctttcctagagcaggtttgaaacgctctttttgtagtatatggaagtggatgtttcggacggttttaggcccatggtgataaagggaatatcttcccctacaagctagaaagaagcattctgtgaaacttgtttgtgatgtgtgtactgaactaacagagttgaacctttctttttacagagcagttttgaaacactctttttgtagaatctgtgaggggatatttggatagatttcaggatttcgttggaaacgggaatatcttcatatgaaatctcgacagaagcattctcagaaacttccttgtgatatgtgcattcaagtcacagagttgaatattccctttcacagagtaggtttgaaacactctttttgtagaatctggaagtggacatttggagcgccttgacacctacggtgaaaagggaaatatcttcccataaaaactagacagaagcaatctcagaatcttctttgggatatatggacgcagctaacagagttgaacctttctattgacagagcagttttgaaacagtctttctgtggaatctgcaagtggatatttggatagcttggaggatttcgttggaaacgggattacgtataaaatgtagacagcagcatcctcagaaccttctttgtgatgtgtgcattcaagtcacagagttcaacattccctttcgtacagcagttttgaaacactctttctgtagtaactggaagtgaacattaggacagctttcaggtctatggtgagaaaggaaatatcttcaaataaaaactagacagaagcattctgataaacttgtttgtgaagtgtgaactcagctaacagtggtggatctttcttttcatacagcagttttgaaaaacactttgttgaatctgcaagtggacatttggatagatttgaagatttcgttggaaacgggaatatcttcatatcaaatctagacagaagcattctcagaaacgtctttgtgatgtttgcattcaactcatagatttgaacattccgtttcagagagcagctttgaagcactctttttgtagtatgtgcaagtggatatttggagagctctgacgcctacggtgaaaaagcaaatatcttcccataaccactagacagaaacattctcagaaactcctttatgacgtatgtactcaactaacagagaagaaccttccttttgacagagcagttttgatacactctttttgtagaatctgcaagtgcatatttggatagctgtgaagatttcgttggaaacgggaatatcttcctataaaatctagacagaagcattctcagaaactgctctgtgatgtctgcattcaagtcacagagttgaacattgcctttcatagagcaggtttgaaatgctgtttttgtagtatatggaagtggacgtttcggacggtttgaggcccatggtgataaagggaatatcttcccctacaagctagaaagaagcattctgtgaaacttgtttgtgatgtgtgtactcaactaacagagttgaacctttctttttgcagagcagttttgaaacactctttttgtagaatctgcgaggggatatttggatagatttcaggatttcgttggaaacgggaatatcttcatataaaatctcgacagaagcattctcagaaacttccttgtgatatgtgcattcaagtcacagagttgaatattccctttcacagagtaggtttgaaacactctttttgtagtatctggaagtggacatttggagcgccttgacgcctacggtgaaaagggaaatatcttcccataaaaactagacacaagcaatctcagaattttctttgggatatatgcacacagctaacagagttgaacttttctattgacatagcagttttgaaacagtctttctgtggaatatgcaagtggatatttcgatagcttggaggatttcgttggaaacgggattacgtataaaaagtagacagcagcatcctcaggaaacttctttgtgatgtgtgcattcaagtcacagcagttgaacattccctttcgtacagcagttttgaaacactctttctgtagtatctggaagtgaacattaggacagctttcagctctatggtgagaaaggaaatatcttcaaataaaaactagacagaagcattctcataaacttctttgtgatgtgtgaactcagctaaccgaggtggatctttcttttgatagagcagttctgaaaaacactttttgttgaatctgcaggtggacatttggatagatttgaagatttcgttggaaacgggaataacttcatttcaaatctagacagaagcattctcagaaacgtctttgtgatgtttgcattcaactcatagagttgaacattccctttcagagagcagctttgaagcactctttttgtagtatgtgcaagtggatatttggatcgctctgaggcctaaggtgaaaaagcaaatatcttcccataaccactagacagaaacattctcaggaactcctttatgatgtatgcactcacctaacagagaagaaccttccttttgacagagcagttttgatacactctttttgtagaatctgcaagtggatatttggatagctgtgaagatttcgttggaaacgggaatatcttcctataaaatctagacagaagcattctcaggaactgctctgcgatgtctgtattcaagtcacagggttgaacattgcctttcatagagcaggtttgaaacgctctttttgtagtatatggaagtggacgtttcggacggtttgaggcccatggtgataaagggaatatcttcccctacaagctagaaagaagcattctgtgaaacttgtttgtgatgtgtactcaactaacagagttgaacctttctttttacagagcagttttgaaacactctttttgtagaatctgcgaggggatatttggatagatttcaggatttcgttggaaacgggaatgtcttcatataaaatctcgacagaagcattctcagaaacttctttgtgatatctgcattcaagtcacagagttgaatattccctttcacagagtaggtttgaaacactctttttgtagtatctggaagtggacatttggagcgccttgacgcctacggtgaatagggaaatatcttcccataaaaactagacagaagcaatctcagaattttctttgggatgtatgcacatagctaacagagttgaacctttctttttacagagcagttttgaaacactctttttgtagaatctgcaagtggatatttggatagcttggaggatttcgttggaaacgggattacgtataaaaagtagacggcagcatcctcagaaacatccttgtgatgtgtgcattcaagtcacagagttgaacattccctttcgtacagcagttttgaaacactctttctgtagtatctggaagtgaactttaggagagctttcaggtctatagtgagaaaggatatatcttcaaataaaaactagacagaagcattctcataatcttgtttgtgatgtgtgaactcagctaacagaggtggatctttcttttgatagagcagttctgaaaaacactttttgttgaatctgcaagtggacatttggatagatttgaagatttcgttggaaacgggaatatcttcatatcaaatctagacagaagcattctcagaaacgtctttgcgatgtttgcattcaactcatagagttgaacattccctttcagagagcagctttgaagcactctttttgtagcatgtgcaagtggacatttggagcgccctgaggcctacggggaaaaagcaaatatcttcccataaccactagacagaaacattctcagaaactgctttatgacgtatgcactcacctaacagagaagaaccttccttttgacagagcagttttgatacactctttttgtagaatctgcaagtagatatttggatagctgtgaagatttcgttggaaacgggaatatcttcctataaaatctagacagaagcattctcagaaactgctctgtgatgtctgcattcaagtcacagagttgaacattgcctttcatagagcaggtttgaaacgctctttttgtagtatagggaagtggatgtttcggacggtttgaggcccatggtgataaagggaatatcttcccctacaagctagaaagaagcattctgtgaaacttgtttgtgatgtatgtactcaactaacagagttgaacctttctttttacagagcagttttgaaacactctttttgtagaatctgcgaggggatatttggatagatttcaggatttcgttggaaacgggaatatcttcatataaaatctcgacagaagcattatcagaaacttcttggtgatatgtgcattcaagtcacagagttgaatattccctttcacagagtaggtttgaaacactctttttgtagtatctggaagtggacatttggagcgccttgacgcctacggtgaaaagggaaatatcttcccataaaaactagacagaagcaatctcagaatcttctttggtatatatgcacgcagctaatagagttgaacctttctattgacagagcagttttgaaacagtctttctgtggaatctgcaagtggatatttggatagcttgggggatttctttggaaaagggattacgtataaaaagtagacagcagcatcctcagaaacttctttgtgatgtgtgcattcaagtcacagagttgaacattccctttcgtacagcagttttgaaacactctttctgtagtatctggaagtgaacatgaggacagctttcaggtctatggtgagaaaggaaatatcttcaaataaaaactagacagaagcattctcataaacttgtttgtgatgtgtgaactcagctaacagaggtggatctttcttttgatagagcagttctgaaaaacactttttgttgaatctgcaagtggacatttcgatagatttgaagatttcgttggaaacgggaacatcttcatatcaaatctagacagaagcattttcagaaacgtctttgtgatgtttgcattcaactcatagagttgaacattccgtttcagagagcagttttgaggcacactttttgtagtatgtgcaagtggatatttggagcgctctgaggcctacggtgaaaaagcaaatatcttcccataaccactagacagaaacattctcagaaactcctttatgacgtatgcactcacctaacagaaaagaaccttccttttgatagagcagttttgatacactctttttgtagaatctgcaagtggatatttggatagctgtgaagatttcgttggaaacgggaatatcttcctataaaatctagacagaagcattctcagaaactgctctgtgatgtctgcattcaagtcacagagttgaacattgcctttcctagagcaggtttgaaacgctctttttgtagtatatggaagtggacgtttcggacggtttgaggcccatggtgataaagggaatattcttcccctacaagctagaaagaagcattctttgaaacttgtttgtgatgtgtgtactcaactaacagagttgaacctttctttttacagagcagttttgaaacactctttttgtagaatctgcgaggggatattttgatacatttcagcatttcgttggaaacgggaatatcttcatatcaaatctagacagaagcattctcagaaagttctttgtgatatctgcactcaagtcacagagttgaatattccctttcacagagtaggtttgaaacactctttttgtagtatctggaagtggacatttggagcgccttgacacctacggtgaaaagggaaatatcttccgataaaaactagacagaagcaatctcagaatcttctttgggatatatgcacgcagctaacagagttgaacctttctattggcagagcagttttgaaacagtctttctgtggaatctgcaagtggatatttggatagcttggaggatttcgttggaaacgggattacgtataaaaagtagacagcagcatcctcagaaacttctttgtgatgtgtgcattcaagtcacagagttgaacattcccttttgtacagcagttttgaaacactctttctgtagtatctggaagtgaacattaagacagctttcaggtctatggtgagaaaggaaatatcttcaaataaaaactagacagaagcattctcataaacttgtttgtgatgtgtgaactcagctaacagaggtggatctttcttttgatagagcagttctgaaaaacactttttgttgaatctgcaagtggacatttggatagatttgaagatttcgttggaaacgggaatatcttcatatcaaattttgacagaagcattctcagaaacgtctttgtgatgtttgcattcaactcatagagttgaacattccgtttcagagagcagctttgaagcactctttttgtagtatgtgcaaggggatatttggagcgctctgaggcctaaggtgaaaaagcaaatatcttcccataaccactagacagaaacattctcagaaactcctttatgacgtatgcactcacctaacagagaataaccttccttttgacagagcagttttgatacactctttttgtagaatctgcaagtggatatttggatagctgtgaaggtttcgttggaaacgggaatatcttcctataaaatctagacagaagcattctcagaaactgctctgtgatgtctgcattcaagtcacagagttgaacattgcctttcatagagcaggtttgaaacgctcgttttgtagtatatggaagtggacttttcggacggtttgaggcccatggtgataaagggaatatcttcccctacaagctagaaagaagcattctgtgaaacttgcttgtgatgtttgtactcaactaacagagttgaacctttctttttacagagcagttttgaaacactctttttgtagaatctgcgaggggatatttggatagatttcaggatttcgttggaaacgggaatatcttcatataaaatctcgacagaagcattctcagaaacttctttgtgatatgtgcattcaagtcacagagttgaatattccctttcacagagtaggtttgaaacactctttttgtagtatctggaagtggacatttgtagcgccttgacgcctacggtgaaaagggaaatatcttcccataaaaactagacagaagcaatctcagaatcttctttgggatatatgcacgcagctaacagagttgaacctttctattgacagagcagttttgaaacagtctttctgtggaatctgcaagtgcatatttggatagcttggaggatttcgttggaaacgggattacgtataaaaattagacagcagcatcctcagaaacttctttgtgcggtgtgcattcaagtcacagagttgaacattccctttcgtacagcagttttgaaacactctttctgtagtatctggaagtgaacattaggacagctttcaggtctatggtgagaaaggaaatatcttaaaataaaaactagacagaagcattctcataaacttgtttgtgatgtgtgaactcagctaacagaggtggatctttcttttgatagagcagttctgaaaaacactttttgttgaatctgcaagtggacatttggatagatttgaagatttcgttgcaaacgggaatatcttcatatcaaatctagacagaagcattctcagaaaagtctttgtgatgtttgcattcaactcacagagttgaacattccctttcagagagcagctttgaagcactctttttgtagtatgtgcaaggggatatttggagcgctctgaggcctacggtgaaaaagcaaatatcttcccataaccactagacagaaacattctcagaaactcctttatgacgtatgcactcacctaacagagaagaacctttcttttgacagagcagttttcatacactcttttggtagaatctgcaagtggatatttggatagctgtgaagatttcgttggaaacgggaatatcttcctataaaatctagacagaagcattctcagaaactgctctgtgatgtctgcattcaagtcacagagttgaacattgcctttcatagagcaggtttgaaatgctctttttgtagtatatggaagtggacgtttcggacggtttgaggaccacggtgataaagggaatatcttcccctacaagctagaaagaacaattctgtgaaacttgtttgtgatgtgtgtactcaactaacagagttgaacctttctttttacagagcagttttgaaacactctttttgtagaatctgcgaggggatatttggatacatttcaggatttcgttggaaacgggaatatcttcatataaaatctcgacagaagcattctcagcaaacttctgtgtgatatctgcattcaagtcacaggagttgaatattccctttcaccgagtaggtttgaaacactctttttgtagtatctggaagtggacatttggagcgccttgacgcctacggtgtaaagggaaatatcttcccataaaaactagacagaagcaatctcagaatcgtctttgggatatatgcacgcagctaacagagttgaacctttctattgacagagcagttttgaaacagtctttctgtggaatctgcaagtggatatttggatagcttggaggatttcgttggaaacaggattacgtataaaaagtagacagccagcatcctcagaaacttctttgtgatgtgtgcattcaagtcacagagttgaacattccctttcgtacagcagttttgaaacactcttcctgtagtatctggaagtgaacattaggacagctttcagctctatggtgagaaaggaaatatcttcaaataaaaactagacagagcattctcataaacttctttgtgatgtgtgaactcagctaaccgaggtggatctttcttttgatagagcagttctgaaaaacactttttgttgaatctgcaagtggacatttggatagatttgaagatttcgttgggaacgggaatatcttcatatcaaatctagacagaagcattctcagaaacgtctttgtgatgttggcattcaactcatagagttgaacattccgtttcagagagcagttttgaagcactctttttgtagtatgtgcaaggggatattttgagcgctctgaggcctaaggtgaaaaagcaaatatcttcccataaccactagacagaaacattctcagaaactcctttatgacgtatgcactcacctaacagaaaagaaccttccttttgacagagcagttttgaaacactctttttgtagaatctgcaagtggatatttggatagctgtgaagatttcgttggaaacgggaatatcttcctataaaatctagacagaagcattctcagaaactgctctgtgatgtctgcattcaagtcacagagttgaacattgcctttcatagagcaggtttgaaacgctctttttgtagtatatggaagtagacgtttcagacggtttgaggcccatggtgataaagggaatatcttcccctacaagctagaaagaagcattctgtgaaacttgtttgtgatgtgtgtactcaactaacagagttgaacctttcttttcacagagcagttttgaaacactctttttgtagaatctgcgagcggatatttggatagatttcaggatttcgttggaaacgggaatatcttcatataaaatgctcgacagaagaattctcagaaacttctttgtgatatgtgcattcaagtcacagagttgaatattccctttcacagagtaggtttgaaacactctttttgtagtatctggaagtggacatttggagcgccttgacgcctacggtggaaagggaaatatcttcccataaaaactagacagaagcaatctcagaatcttctttgggatatatgcacgcagctaacagagttgaacctttctgttgacagagcagttttgaaacagtctttctgtggaatctgcaagtggatatttggatagcttggaggatttcgttggaaacgggattacgtataaaaagtagacagcagcatcctcagaaacttctttgtgatgtgtgcattcaagtcacagagttgaacattccctttcgtacagcagttttgaaacactttttctgtagcatctggaagagaacattaggacagctttcaggtctagggtgagaaaggcaatatcttcaaataaaaactagacagaagcattctcataaacttgtttgtgatgtgtgaactcagctaacagaggtggatctttcttttgatacagcagttctgaaaaacacttttcgttgaatctgcaagtggacatttggatagatttgaagatttcgttggaaacgggaatatcttcatatcaaatctagacagaagcattctcagaaacgtctttgtgatgtttgcattcaactcatagagttgaacattccgtttcagagatcagctttgaagcactctttttgtagtatgtgcaagtggatatttggatcgctctgaggcctaaggtgaaaaagcaaatatcttcccataaccactagacagaaacattctcagaaactcctttatgacgtatgcactcacctaacagagaagaaccttccttttgacagagcagttttgatacactctttttgtagaatctgcaagtggatatttggatagctgtgaagatttcgttggaaacgggaatatcttcctataaaatctagactgaagcattctcagaaactgctctgcgatgtctgcattcaagtcactgagttgaacattgcctttcatagagtaggtttgaaacgctctttttgtagtatatggaagtagacgtttcggacggtttgaggcccatggtgataaagggaatatcttcccctacaagctagaaagaagcattctgtgaaacttgtttgtgatgtgtgtactcaactaacagagttgaacctttctttttaaagagcagttttgaaacactctttttgtagaatctgcgaggggatatttggatacatttcaggatttcgttggaaacgggaatatcttcatataaaatctcgacagaagcattctcagaaacttctttgtgatatctgcattcaagtcacagagttgaatattccctttcacagagtaggtttgaaacactctttttgtagtatctggaagtggacatttggagcgccttgacgcctacggtgaaaagggaaatatcttctcataaaaactagacagaagcaatctcagaatcttctttgggatatatgcacgcagctaacagagttgaacctttctattgacagagcagttttgaaacagtctttctgtggaatctgcaagtggatatttggatagattggaggatttcgttggaaacgggattacgcataaaaagtagacagcagcatcctcagaaacttctttgtgatgtgtgcattcaagtcacagagttgaacattccctttcgtacagcagttttgaaacactctttctgtagtatctggaagtgaacattaagacagctttcagctctatggtgagaaaggaaatatcttcaaataaaaactagacagaagcattctcataaccttgtttgtgatgtgtgaactcagctaacagaggtggatctttcttttgatagagcagttctgaaaaacactttttgttgaatctgcaagtggatatttggatagatttgaagatttctttggaaacgggaatatcttcatatcaaatctagacagaagcattctcagaaacgtctttgtgatgtttgcattcaactcatagagttgaacattccctttcagagagcagctttgaagcactctttttgtagtatgtgcaaggggatattttgagcgctgtgaggcctaaggtgaaaaagcaaatatcttctcataaccactagacacaaacattctcagaaactcctttatgacgtatgcactcacctaactgagaagaaccttccttttgacagagcagttttgatacactctttttgtagaatctgcaagtggatatttggatagctgtgaagatttcgttgaaaacgggaatatcttcctataaaatctagacagaagcattctcagaaactgctctgtgatgtctgcattcaagtcacagagttgaacattgcctttcctagagcaggtttgaaacgctctttttgtagtatatggaagttgacgtttcggacggtttgaggcccatggtgataaagggaatatcttcccctacaagctagaaagaagcattgtgtgaaacttgtttgtgatgtgtgtactcaactaacagagttgaacctttcttttcacagagcagttttgaaacactctttttgtagaatctgcaaggggatatttggatagatttcaggatttcgttggaaacgggaatatcttcatataaaatctcgacagaagcattctcagaaacttctttggaatatgtgtattcaagtcacagagttgaatactccctttcacagagtaggtttgaaacactctttttgtagtatctggaagtggacatttggagcgccttgacgcctacagtgaaaagggaaatatcttcccataaaaactagacagaagcaatctcagaatcttctttgggatatatgcacgcagctaacagagttgaacctttctattgacagagcagttttgaaacagtctttctgtggaacctgcaagtggatatttggatagcttggaggatttcgttggaaacgggattacgtataaaaagtagacagcagcatcctcagaaacttctttgtgatgtgtgctttcaagtcacagtgttgaacattccctttcgtacagtagttttgaaacactctttctgtagtatctggaagtgaacattaggacagcttgcaggtctatggtgagaagggaaatatcttcaaataaaaactagacagaagcattctcataaacatgtttgtgatatgtgaactcagctaacagaggcggatctttcttttgatagagcagttcggaaaaacactttttgttgaatctgcaagtggacatttggatagatttgaagatttcgttggaaacgggaatatcttcatatcaaatctagacagaagtattctcagacacgtctttgtgatgtttgcattcaactcatagagttgaacattcccttccagagagcagctttgaagcactctttttgtagcatgtgcaagtggacatttggagtgccctgaggcctacggggaaaaagcaaatatc
